(19) United States
(12) Patent Application Publication
(10) Pub. No.: US 2023/0357792 A1
(43) Pub. Date: Nov. 9, 2023

(54) METHOD OF ENGINEERING AND ISOLATING ADENO-ASSOCIATED VIRUS

(71) Applicant: Dignity Health, San Francisco, CA (US)

(72) Inventors: Fredric Manfredsson, San Francisco, CA (US); Ivette Sandoval, San Francisco, CA (US)

(21) Appl. No.: 17/906,715

(22) PCT Filed: Mar. 19, 2021
(86) PCT No.: PCT/US21/23314

§ 371 Date: Sep. 19, 2022

Related U.S. Application Data
(60) Provisional application No. 63/141,656, filed on Jan. 26, 2021.
(60) Provisional application No. 62/992,671, filed on Mar. 20, 2020.

(51) Int. Cl. C12N 15/86; C12N 5/0793; G16B 20/30

(52) U.S. Cl. CPC C12N 15/86; C12N 5/0619; G16B 20/30; C12N 2750/14122; C12N 2750/14143

(57) ABSTRACT

Engineered adeno-associated virus (AAV) capsid proteins, each having tropism to a desired target cell or tissue type, are disclosed. Also disclosed are methods of generating the engineered proteins, libraries comprising the engineered proteins, recombinant viruses comprising the engineered proteins, and nucleic acid constructs encoding the engineered proteins.

### CROSS-REFERENCE TO RELATED APPLICATIONS

[0001] This application claims priority from Provisional Application No. 62/992,671, filed Mar. 20, 2020, and Provisional Application No. 63/141,656, filed Jan. 26, 2021, the contents of both of which are hereby incorporated by reference in their entirety.

### GOVERNMENTAL RIGHTS

[0002] This invention was made with government support under R21AG064221 awarded by the National Institute of Health. The government has certain rights in the invention.

### SEQUENCE LISTING

[0003] This application contains a Sequence Listing that has been submitted in ASCII format via EFS-Web and is hereby incorporated by reference in its entirety. The ASCII copy is named 677427_SequenceListing_ST25.txt, and is 647 kilobytes in size.

### FIELD OF THE INVENTION

[0004] The present disclosure provides engineered adeno-associated virus (AAV) capsid proteins each having tropism to a desired target cell or tissue type and methods for identifying the engineered capsid AAV proteins from a population of engineered AAV capsid proteins.

### BACKGROUND OF THE INVENTION

[0005] Advances in genetic tools have vastly improved our ability to study brain form and function. For instance, the use of inducible transgenic animals, together with other tools such as viral vectors, has allowed for rather intricate experimentation. Nevertheless, a significant barrier still remaining is the lack of tools that allow for very precise manipulations (e.g. overexpression), labeling/inventorying (e.g. cell tracking), targeting, or interrogating (e.g. studying cellular function) of non-neuronal cells such as microglia. For instance, the brain remains one of the true mysteries in science and nature. Although tremendous advances in the last century have shaped our understanding of nervous system function, an in-depth understanding of brain connectivity and cellular interaction is still lacking. This critical need is particularly true for experimentation where multiple distinct populations of cells are being manipulated. Indeed, microglia are becoming increasingly appreciated for performing significant roles important in synaptic formation, maintenance, and pruning. Thus, the ability to be able to perform intricate genetic manipulations of microglia, with the control of parameters such as spatiotemporal control and dosing, and in conjunction with other cell-specific manipulations, is increasingly important

### SUMMARY OF THE INVENTION

[0006] One aspect of the present disclosure encompasses a method for identifying from a population of engineered AAV capsid proteins, a capsid protein exhibiting preferential tropism to a desired cell type, such as a cell of microglial lineage. A cell of the desired cell type can be a neural cell. The method comprises generating a plurality of recombinant AAV virions (rAAVs) each comprising an engineered capsid protein encapsidating an AAV vector. The AAV vector has AAV inverted terminal repeats (ITRs) flanking a transgene and an identifier sequence unique to the capsid protein encapsidating the vector. The method further comprises infecting a population of more than one cell type with the generated rAAVs to generate a plurality of transduced cells each comprising a rAAV. The sequence of the unique identifier sequence in each transduced cell and the cell type of each transduced cell are determined to identify the capsid protein present in each cell. The cell type of each cell can comprise determining a transcriptional profile for each cell. A capsid protein exhibiting preferential tropism to the desired cell type is identified based on the presence and absence of the protein in each cell type, wherein the protein exhibits preferential tropism to the desired cell type if the protein is present in the desired cell type and absent in cell types other than the desired cell type. The method can be used to identify a plurality of engineered AAV capsid proteins, each exhibiting preferential tropism to a desired cell type.

[0007] In some aspects, the transgene encodes a reporter. When the transgene encodes a reporter, the method can further comprise detecting the transgene in each cell in the population of cells to identify cells transduced with an rAAV.

[0008] The engineered protein can comprise a peptide insertion. The peptide insertion can be in a region of the capsid protein of AAV2 selected from I-261, I-381, I-447, I-534, I-573, I-587, I-453, I-520, I-588, I-584, I-585, I-588, I-46, I-115, I-120, I-139, I-161, I-312, I-319, I-459, I-496, I-657, Y257, N258, K259, S391, F392, Y393, C394, Y397, F398, Q536, Q539, or a corresponding position in a capsid protein of another AAV serotype. In some aspects, the engineered capsid protein is an AAV2 capsid protein comprising the Y444F, Y500F, Y730F, T491V, R585S, R588T, R487G amino acid substitutions, or combinations thereof, or corresponding substitutions in the capsid protein of another AAV serotype. In some aspects, the engineered capsid protein is an AAV2 capsid protein comprising the R585S, R588T, and R487G amino acid substitutions, or corresponding substitutions in the capsid protein of another AAV serotype.

[0009] Another aspect of the present disclosure encompasses a computerized system for identifying a rAAV exhibiting preferential tropism to a desired cell type. The computerized system comprises a general purpose computer having at least one processor; computer readable memory storing a database of tropism properties exhibited by a plurality of engineered AAV capsid proteins identified using a method as described above; and a computer readable medium comprising functional modules including instructions for the general purpose computer which when executed by the at least one processor, cause the at least one processor to query the database and select among the plurality of engineered AAV capsid proteins a capsid protein exhibiting preferential tropism to a desired cell type.

[0010] The database can further comprise a plurality of cell-type-specific transcriptional profile information associated with each cell type, and a plurality of nucleic acid sequences, each sequence encoding a unique engineered AAV capsid protein. The database can further comprises a plurality of identifier sequences, wherein each identifier is unique to a nucleic acid sequence encoding a unique engineered AAV capsid protein.

[0011] Yet another aspect of the present disclosure encompasses a recombinant AAV virion (rAAV) library comprising a plurality of rAAV members. Each rAAV member comprises an engineered AAV capsid protein encapsidating an AAV vector, wherein the AAV vector has AAV inverted terminal repeats (ITRs) flanking a transgene and an identifier sequence unique to the capsid protein of each rAAV. Each engineered AAV capsid protein exhibits preferential tropism to a desired cell type. The engineered capsid protein can comprise at least one mutation relative to a wild type capsid protein, and the mutation can be selected from a peptide insertion, an amino acid substitution, and an amino acid deletion. In some aspects, the desired cell type is a glial cell. When the cell is a glial cell, each peptide insertion can be derived from an amino acid sequence of SEQ ID NO 2-183. Each rAAV can exhibit preferential tropism to a desired target cell type.

[0012] Additional aspects of the present disclosure encompasses a library of nucleic acid constructs encoding the rAAV library described above, and a plurality of cells comprising the rAAV library, the library of nucleic acid constructs encoding the rAAV library, or a combination thereof.

[0013] One aspect of the present disclosure encompasses a method of optimizing delivery of a transgene to a desired cell type in a population of more than one cell type. The method comprises identifying or having identified an engineered AAV capsid protein exhibiting preferential tropism to the desired cell type by the method described above or by the computerized system described above. The method further comprises transducing a population of cells comprising the desired cell type with an rAAV comprising the identified engineered AAV capsid protein to thereby deliver the transgene to the desired cell type. A cell of the desired target cell type can be a central nervous system cell, a microglial cell, or an astrocyte.

[0014] An additional aspect of the present disclosure encompasses a kit for identifying or generating engineered AAV capsid proteins exhibiting preferential tropism to a desired target cell type. The kit comprises a library of rAAVs described above, a library of nucleic acid constructs described above, or a plurality of cells comprising the rAAV library, the library of nucleic acid constructs encoding the rAAV library, or a combination thereof.

### BRIEF DESCRIPTION OF THE FIGURES

[0015] The patent or application file contains at least one drawing executed in color. Copies of this patent or patent application publication with color drawing(s) will be provided by the Office upon request and payment of the necessary fee.

[0016] FIG. 1A depicts a vector preparation where GFP was controlled by the CAG promoter. Low magnification image showing the area of transduction (mainly neuronal).

[0017] FIG. 1B depicts a vector preparation where GFP was controlled by the CAG promoter. In the periphery of the transduced area (possibly because microglial transduction was masked by massive neuronal transduction in the center), numerous transduced (green, GFP) microglia (red; Iba1) can be seen. In order to test the activity of various ubiquitous promoters a separate animal was also injected with a cassette controlled by the CMV promoter (same capsid). Although this image only depicts the transgene (GFP), numerous cells with microglial morphology can be seen throughout. This figure demonstrates that there is no biological “block” of AAV transduction of microglia; moreover, it demonstrates the overall feasibility of our approach.

[0018] FIG. 1C depicts a vector preparation where GFP was controlled by the CAG promoter. Confocal imaging of the area outlined in FIG. 1B shows localization of the GFP transgene in microglia.

[0019] FIG. 1D depicts a vector preparation where GFP was controlled by the CAG promoter, where a humanized CMV promoter was used.

[0020] FIG. 2 Viral library design. The AAV genome is linearized via restriction digestion. Step 1: The viral components are mixed with the microglial ligand (ML) oligonucleotide pool, and barcode (BC) oligonucleotide pool and assembled using a 4-part Gibson assembly in to a genome library (Step 2). The library is duplicated and one copy is subject to CRE recombinase treatment which brings the barcode and ML into close range. This library is subject to paired-end Illumina sequencing, and a database linking the BC to the ML is created (Step 3; arrows indicate sequence primers). Step 4: A second copy of the library is utilized for viral vector generation and in vivo experimentation (Step 5). Step 6: Single cell RNAseq is utilized to identify the profile of infected cells and associated barcodes (arrow indicates RNAseq primer). Genomics is utilized to generate a database where the cellular profile, barcode, and microglial ligand is linked. This database can then be queried to identify capsids that only transduce certain cell-types, in this case microglia.

[0021] FIG. 3 Preliminary scRNA seq data. AAV2 was injected into the brain of adult C57bl6 mice. Four days later, animals were sacrificed and nuclei were collected for scRNA seq processing. A preliminary cluster analysis was based on best match to average expression profile of reference transcriptome. Major clusters (neurons, oligodendrocytes and astrocytes, and microglia) were detected. The RNAseq data was also queried for GFP transcripts (i.e. transduced cells) which were found in neurons and oligodendrocytes. Although a cluster of microglial cells was identified, no AAV transcriptional activity was detected in those cells.

[0022] FIG. 4A Example of Dual RNAscope ISH/IHC. Section from animal injected with AAV5 was processed for ISH against non-transcribed portion of genome (brown), followed by IHC against IBA1 (blue). Low mag micrograph of the nigra.

[0023] FIG. 4B Example of Dual RNAscope ISH/IHC. Section from animal injected with AAV5 was processed for ISH against non-transcribed portion of genome (brown), followed by IHC against IBA1 (blue). High magnification of area outlined in FIG. 4A. With AAV5, no overlap of AAV and Iba1 was found.

[0024] FIG. 4C Example of Dual RNAscope ISH/IHC. Section from animal injected with AAV5 was processed for ISH against non-transcribed portion of genome (brown), followed by IHC against IBA1 (blue). High magnification of area outlined in FIG. 4B demonstrating that the microglia is completely void of viral genomes. This also demonstrates the resolution by which the analysis takes place.

[0025] FIG. 5 Example of AAV-medicated CRISPR/Cas9 gene inactivation in vivo. A) Surveyor® mutation detection assay showing efficient targeting of the TH gene, determine by the ratio between cleaved (red arrow) and parental (black arrow) DNA fragments. B and C) Representative images of brain sections from AAV-CRISPR treated rats clearly demonstrate robust TH gene knockout in the treated hemisphere (bottom left) which is not seen in the control gRNA treated hemisphere (top left). Similarly, immunofluorescence staining (C) indicates efficient TH (red) gene ablation in cells transduced with AAV-CRISPR-TH (bottom) but not in control brains (top panel). GFP is a marker of AAV-CRISPR transduction. High level of GFP and TH co-localization is obvious in control brains demonstrating lack of toxicity. In contrast, in CRISPR-TH treated brains, the majority of transduced (green) cells show no TH expression (white arrows in high magnification image). D) Quantification of fluorescence intensity (as in indication of TH expression) in AAV-CRISPR transduced cells (GFP+) showing that a majority of cells are homozygous for TH knockout. Herein this workflow is utilized to generate CRISPR specific for EED.

[0026] FIG. 5A Example of AAV-medicated CRISPR/Cas9 gene inactivation in vivo. Surveyor® mutation detection assay showing efficient targeting of the TH gene, determine by the ratio between cleaved (red arrow) and parental (black arrow) DNA fragments.

[0027] FIG. 5B Example of AAV-medicated CRISPR/Cas9 gene inactivation in vivo. Representative images of brain sections from AAV-CRISPR treated rats clearly demonstrate robust TH gene knockout in the treated hemisphere (bottom left) which is not seen in the control gRNA treated hemisphere (top left).

[0028] FIG. 5C Example of AAV-medicated CRISPR/Cas9 gene inactivation in vivo. Immunofluorescence staining indicates efficient TH (red) gene ablation in cells transduced with AAV-CRISPR-TH (bottom) but not in control brains (top panel). GFP is a marker of AAV-CRISPR transduction. High level of GFP and TH co-localization is obvious in control brains demonstrating lack of toxicity. In contrast, in CRISPR-TH treated brains, the majority of transduced (green) cells show no TH expression (white arrows in high magnification image). D) Quantification of fluorescence intensity (as in indication of TH expression) in AAV-CRISPR transduced cells (GFP+) showing that a majority of cells are homozygous for TH knockout. Herein this workflow is utilized to generate CRISPR specific for EED.

[0029] FIG. 5C Example of AAV-medicated CRISPR/Cas9 gene inactivation in vivo. Quantification of fluorescence intensity (as in indication of TH expression) in AAV-CRISPR transduced cells (GFP+) showing that a majority of cells are homozygous for TH knockout. Herein this workflow is utilized to generate CRISPR specific for EED.

[0030] FIG. 6A Neurolucida based spine quantitation. This figure is aimed to demonstrate feasibility with neuron reconstruction. In this case tissue was Golgi impregnated. The same general approach is taken in other experiments albeit using YFP instead of Golgi.

[0031] FIG. 6 Neurolucida based spine quantitation. This figure is aimed to demonstrate feasibility with neuron reconstruction. Striatal medium spiny neuron was reconstructed using Neurolucida and optical sectioning. The same general approach is taken in other experiments albeit using YFP instead of Golgi.

[0032] FIG. 7A. In vivo recording of striatal MSN single activity. Inset shows traces of cortical-evoked striatal activity at increasing intensities of stimulation (arrows: stimulus artifact).

[0033] FIG. 7B. Spontaneous activity of a MSN recorded from a sham control rat.

[0034] FIG. 7C. Typical MSN response (same cell as in FIG. 7B) to somatic current injections. Red arrow heads are the onset-offset artifacts of the current-induced juxtacellular ejection.

[0035] FIG. 8. Photograph of spinal cord harvested from Sprague Dawley rats injected with an rAAV2 having improved neuronal tropism.

[0036] FIG. 9. Photograph of immunostaining of sections of the spinal cord in FIG. 8.

[0037] FIG. 10. The first panel is a photograph of immunostaining of an L3 section of the spinal cord in FIG. 8. The second panel is a photograph taken at higher magnification of the L3 section, showing transgene expression in both dorsal and ventral horns of the spinal cord.

[0038] FIG. 11. Upper panels; photographs of immunostaining and FISH staining of a section of the spinal cord in FIG. 8. Lower panels; results from a 1:10 dilution of the vector (negative control).

[0039] FIG. 12. Higher magnification of the section of immunostaining and FISH staining of the spinal cord of FIG. 11.

[0040] FIG. 13. Higher magnification of the section of FISH staining of sections of the spinal cord of FIG. 11 at the dorsal horn, intermediate zone, and ventral horn.

[0041] FIG. 14. Photographs of immunostaining of sections of a spinal cord injected with a GFP-expressing rAAV2.

[0042] FIG. 15. Sagittal section from animal receiving injection as outlined in FIG. 8 (upper panel) and a photograph of the motor cortex taken at higher magnification

### DETAILED DESCRIPTION

[0043] The present disclosure is based in part on the development of a method for identifying an adeno-associated virus (AAV) capsid protein exhibiting tropism to a desired cell type from a population of engineered AAV capsid proteins. Methods described herein can be used to identify engineered capsid proteins having the ability to target cell types not normally targeted by the wild type version of the protein. In addition, the methods described herein can be used to identify engineered capsid proteins exhibiting preferential tropism to a desired cell type. Methods described can also be used to generate libraries of recombinant AAV virions (rAAVs) and nucleic acids encoding the libraries of rAAVs, wherein each engineered AAV capsid protein exhibits tropism to a select cell type. The disclosure also provides computerized systems configured to perform in silico selection to identify rAAVs exhibiting tropism to a desired cell type. Other aspects of the present disclosure are also described.

### I. Method of Identifying AAV Capsid Proteins

[0044] One aspect of the present disclosure encompasses a method for identifying from a population of engineered AAV capsid proteins, a capsid protein exhibiting preferential tropism to a desired cell type. Engineered capsid proteins can be as described in Section I(b) below.

[0045] The method comprises generating a plurality of recombinant AAV virions (rAAVs) each comprising an engineered AAV capsid protein encapsidating an AAV vector. For instance, 1, 2, 3, 4, 5, 6, 7, 8, 9, 10, or a library of rAAVs, can be generated, wherein each rAAV comprises an engineered AAV capsid protein exhibiting preferential tropism to a desired cell type. Libraries of rAAVs can be as described in Section II below. A population of cells of more than one cell type are infected with the rAAVs to generate a plurality of transduced cells each comprising an rAAV. Cells and cell types can be as described in Section I(c) below, and methods of infecting cells can be as described in Section I(d) below.

[0046] The sequence of the unique identifier in each transduced cell, and the cell type of a cell comprising the unique identifier are determined, thereby matching each unique identifier with the cell type of the cell comprising the identifier. As further explained in Section II below, each unique identifier is matched to one engineered capsid protein. Accordingly, determining the sequence of an identifier in a cell transduced with a rAAV comprising an engineered capsid protein encapsidating a vector comprising the identifier, also identifies the matched engineered capsid protein in the transduced cell.

[0047] The ability to identify a cell type that an rAAV can transduce, provides the capability to identify engineered capsid proteins capable of transducing cell types normally refractory to infection by wild types of AAV capsid proteins. For instance, the inventors were able to identify at least one engineered capsid protein with altered tropism capable of transducing microglia, a cell type remarkably refractory to infection by wild types of AAV capsid proteins.

[0048] Importantly, it is also possible to determine each cell type that a certain engineered capsid protein cannot transduce. Accordingly, positive and negative selection can be used to determine the preferential tropism exhibited by an engineered capsid protein to a cell type in a population of more than one cell type. More specifically, a capsid protein exhibiting preferential tropism to a desired cell type can be identified based on the presence and absence of the protein in each cell type, wherein the protein exhibits preferential tropism to the desired cell type if the protein is present in the desired cell type and absent in cell types other than the desired cell type.

### (a) Adeno Associated Virus (AAV)

[0049] A rAAV of the instant disclosure comprises an AAV capsid protein encapsidating an AAV vector. Briefly, AAV vectors generally comprise the AAV inverted terminal repeats (ITRs) of the virus flanking heterologous nucleic acid sequences of interest. AAV ITRs contain all cis-acting elements involved in AAV genome rescue, replication, and packaging. Accordingly, the ITRs can be segregated from the viral encoding regions allowing for AAV vector design that comprises only the ITRs of the virus flanking heterologous nucleic acid sequences of interest. Generally, rAAV particles are generated by transfecting producer cells with a plasmid (AAV cis-plasmid) containing a cloned AAV vector, and a separate construct expressing in trans the viral rep and cap genes. The adenovirus helper factors, such as E1A, E1B, E2A, E4ORF6 and VA RNAs, can be provided by either adenovirus infection or transfecting into production cells a third plasmid that provides these adenovirus helper factors.

[0050] An AAV vector of the instant disclosure comprises AAV ITRs flanking a transgene and an identifier nucleic acid sequence (also referred to herein as identifier sequence, unique identifier or simply identifier) unique to the capsid protein of each rAAV. In some aspects, the transgene may also encode a reporter. As used herein, a “transgene” refers to any nucleic acid molecule, e.g., a DNA molecule having a nucleic acid sequence foreign to a cell to which the molecule is introduced. For example, the DNA molecule may have a nucleic acid sequence encoding a protein of interest which is foreign to the cell to which the DNA molecule is introduced. Expression of the reporter can be used to determine transduction efficiency of the rAAV and identify cells successfully transduced by the rAAV during experimentation. Reporters can be as described in Section I(d) herein below.

[0051] As further explained in Section II below, each unique identifier is matched to one engineered protein and is used to identify the matched engineered capsid protein in transduced cell. In some aspects, an AAV vector further comprises at least one second identifier. The second identifier can, for example, be used to identify a library of rAAVs. Accordingly, when a second identifier is used to identify a library of rAAVs, the second identifier has a sequence in common with all second identifiers in the library of AAVs.

[0052] An AAV as described herein can be any AAV serotype, including a serotype selected from AAV1, AAV2, AAV3, AAV4, AAV5, AAV6, AAV7, AAV8, AAVrh8, AAVrh10, AAVrh39, or AAVrh43. The rAAVs of the disclosure can be pseudotyped rAAVs. Pseudotyping is the process of producing viruses or viral vectors in combination with foreign viral envelope proteins. The result is a pseudotyped virus particle comprising a vector derived from AAV serotype encapsidated by an AAV capsid protein from a different serotype. Accordingly, the foreign viral envelope proteins can be used to alter host tropism or an increased/decreased stability of the virus particles. In some aspects, a pseudotyped rAAV comprises nucleic acids from two or more different AAVs, wherein the nucleic acid from one AAV encodes a capsid protein, and the nucleic acid of at least one other AAV encodes other viral proteins and/or the viral genome. For example, a pseudotyped AAV vector containing the ITRs of serotype X encapsidated with the proteins of Y is designated as AAVX/Y (e.g., AAV2/1 has the ITRs of AAV2 and the capsid of AAV1). In some aspects, the AAV serotype is AAV2.

[0053] In some aspects, the capsid protein is an AAV2 capsid protein. The AAV capsid protein can be a capsid protein of AAV2 having an amino acid sequence at least 75%, 76%, 77%, 78%, 79%, 80%, 81%, 82%, 83%, 84%, 85%, 86%, 87%, 88%, 89%, 90%, 91%, 92%, 93%, 94%, 95%, 96%, 97%, 98%, or 99% identical to the amino acid sequence of SEQ ID NO: 1. In some aspects, the capsid protein is a capsid protein of AAV2 having an amino acid sequence at least 85%, at least 90%, at least 95%, or at least 99% identical to the amino acid sequence of SEQ ID NO: 1.

### (b) Engineered AAV Capsid Proteins

[0054] Methods of the instant disclosure can identify an engineered AAV capsid protein exhibiting preferential tropism to a desired cell type. As used herein, the term “preferential tropism” or “preferentially tropic” when applied to an engineered AAV capsid protein, can be used interchangeably and refer to the ability of recombinant AAV virions (rAAVs) comprising the engineered protein to transduce a desired cell type over cell types other than the desired cell types in a population of cells comprising more than one cell type. Accordingly, an engineered AAV capsid protein said to be preferentially tropic to a desired cell type exhibits a higher transduction efficiency in the desired cell type when compared to the transduction efficiency in cell types other than the desired cell type. For instance, an engineered protein exhibiting tropism to a desired cell type can have a 2, 3, 4, 5, 6, 7, 8, 9, 10, 20, 30, 40, 50, 100, 200, 300, 400, 500, or more times higher transduction efficiency in the desired cell type when compared to the transduction efficiency of the engineered protein in cell types other than the desired cell type. The transduction efficiency of a given AAV capsid protein is determined by the efficiency of each of the different steps in the AAV life cycle. Methods of determining transduction efficiency of a rAAV are known and include measuring the level of expression of a transgene of the rAAV in cells infected with the rAAV.

[0055] An engineered capsid protein comprises one or more mutations relative to a wild type capsid protein. A mutation can be a peptide insertion, an amino acid substitution, or an amino acid deletion. An engineered capsid protein can also be a chimeric capsid protein comprising fragments of capsid proteins of various AAV serotypes.

[0056] In some aspects, the engineered AAV capsid protein comprises one or more peptide insertions in the capsid protein. In some aspects, the engineered AAV capsid protein comprises two or more peptide insertions in the capsid protein. A peptide can be any sequence of sufficient length to modify the tropism of an engineered capsid protein.

[0057] For instance, a peptide can be about 2, 3, 4, 5, 6, 7, 8, 9, 10, 11, 12, 13, 14, 15, 16, 17, 18, 19, 20, 21, 22, 23, 24, 25, 26, 27, 28, 29, 30, 31, 32, 33, 34, 35, 36, 37, 38, 39, 40, 41, 42, 43, 44, 45, 50, 55, 60, 65, 70, 75, 80, 85, 90, 95 amino acids in length or longer. A peptide can also be about 5-10, 7-15, 10-15, 10-20, 15-20, 20-25, 20-30, 30-35, 30-40, 35-40, 40-45, 40-50, 45-50, 50-55, 50-60, 55-60, 60-65, 60-70, 65-70, 70-75, 70-80, 75-80, 80-85, 80-90, 85-90, 90-95, 90-100, 95-100, or more than 100 amino acids in length or any individual length within these ranges.

[0058] In some aspects, an insertion is in one or more surface exposed loop regions of the capsid protein. In some aspects, the insertion is in one or more variable regions of the capsid protein. The one or more insertion site can be in a region of the capsid protein of AAV2 selected from I-261, I-381, I-447, I-534, I-573, I-587, I-453, I-520, I-588, I-584, I-585, I-588, I-46, I-115, I-120, I-139, I-161, I-312, I-319, I-459, I-496, I-657 or a corresponding position in a capsid protein of another AAV serotype.

[0059] Disruption of the surface exposed loop regions such as by insertion of a peptide in the loop region, also disrupts canonical entry of AAV mediated via HSPG binding, a secondary receptor of AAV. Disrupting AAV entry mediated via HSPG binding can enhance binding to the AAVR receptor, thereby improving transduction efficiency of a desired cell type. The inventors also surprisingly discovered that modifying the following amino acid residues outside the surface exposed loop regions can also disrupt entry mediated via HSPG binding and improve transduction efficiency of a desired cell type: S153, D169, T174, D176, D177, or K178, or combinations thereof. Further, the inventors discovered the following amino acid residues outside the surface exposed loop regions that, when modified, can enhance binding to the AAVR receptor and improve transduction efficiency of a desired cell type: Y257, N258, K259, S391, F392, Y393, C394, Y397, F398, Q536, Q539, or combinations thereof. Accordingly engineered capsid proteins of the instant disclosure can have a mutation in the surface exposed loop region, at the S153, D169, T174, D176, D177, K178, Y257, N258, K259, S391, F392, Y393, C394, Y397, F398, Q536, Q539 amino acid residues of the AAV2 capsid protein, or combinations thereof, or corresponding substitutions in the capsid protein of another AAV serotype to enhance binding to the AAVR receptor. Engineered capsid proteins comprising these mutations can be used as a starting sequence to generate engineered capsid proteins having preferential tropism using methods of the instant disclosure. In some aspects, engineered capsid proteins of the instant disclosure comprise the Y444F, Y500F, Y730F, T491V, R585S, R588T, R487G mutations, or combinations thereof. In some aspects, engineered capsid proteins of the instant disclosure comprise the R585S, R588T, and R487G mutations. This engineered capsid protein exhibits considerably improved transduction efficiency, and can be used as a starting sequence to generate engineered capsid proteins having preferential tropism using methods of the instant disclosure.

[0060] In some aspects, a peptide inserted into the capsid protein is a ligand of a cell type of interest. In other aspects, a peptide inserted into the capsid protein is derived from a ligand of a cell type of interest. A peptide derived from a ligand can be a mutated ligand, a fragment of the ligand, or a mutated fragment of a ligand of a cell type of interest. For instance, a peptide derived from a ligand can have an amino acid sequence at least 75%, 76%, 77%, 78%, 79%, 80%, 81%, 82%, 83%, 84%, 85%, 86%, 87%, 88%, 89%, 90%, 91%, 92%, 93%, 94%, 95%, 96%, 97%, 98%, or 99% identical to a mutated ligand, a fragment of the ligand, or a mutated fragment of a ligand.

[0061] When the cell of the desired cell type is of glial lineage, a peptide can be an amino acid sequence selected from SEQ ID NO 2-183 or a peptide derived therefrom. In some aspects, the peptide is an amino acid sequence selected from SEQ ID NO 2-153 or a peptide derived therefrom. In other aspects, the peptide is an amino acid sequence selected from SEQ ID NO 154-176 or a peptide derived therefrom. In yet other aspects, the peptide is an amino acid sequence selected from SEQ ID NO 177-183 or a peptide derived therefrom.

[0062] In one aspect, the peptide is an amino acid sequence having 85% or more identity with SEQ ID NO 154 or a peptide derived therefrom. In one aspect, the peptide is an amino acid sequence having 85% or more identity with SEQ ID NO 155 or a peptide derived therefrom. In one aspect, the peptide is an amino acid sequence having 85% or more identity with SEQ ID NO 156 or a peptide derived therefrom. In one aspect, the peptide is an amino acid sequence having 85% or more identity with SEQ ID NO 157 or a peptide derived therefrom. In one aspect, the peptide is an amino acid sequence having 85% or more identity with SEQ ID NO 158 or a peptide derived therefrom. In one aspect, the peptide is an amino acid sequence having 85% or more identity with SEQ ID NO 159 or a peptide derived therefrom. In one aspect, the peptide is an amino acid sequence having 85% or more identity with SEQ ID NO 160 or a peptide derived therefrom. In one aspect, the peptide is an amino acid sequence having 85% or more identity with SEQ ID NO 161 or a peptide derived therefrom. In one aspect, the peptide is an amino acid sequence having 85% or more identity with SEQ ID NO 162 or a peptide derived therefrom. In one aspect, the peptide is an amino acid sequence having 85% or more identity with SEQ ID NO 163 or a peptide derived therefrom. In one aspect, the peptide is an amino acid sequence having 85% or more identity with SEQ ID NO 164 or a peptide derived therefrom. In one aspect, the peptide is an amino acid sequence having 85% or more identity with SEQ ID NO 165 or a peptide derived therefrom. In one aspect, the peptide is an amino acid sequence having 85% or more identity with SEQ ID NO 166 or a peptide derived therefrom. In one aspect, the peptide is an amino acid sequence having 85% or more identity with SEQ ID NO 167 or a peptide derived therefrom. In one aspect, the peptide is an amino acid sequence having 85% or more identity with SEQ ID NO 168 or a peptide derived therefrom. In one aspect, the peptide is an amino acid sequence having 85% or more identity with SEQ ID NO 169 or a peptide derived therefrom. In one aspect, the peptide is an amino acid sequence having 85% or more identity with SEQ ID NO 170 or a peptide derived therefrom. In one aspect, the peptide is an amino acid sequence having 85% or more identity with SEQ ID NO 171 or a peptide derived therefrom. In one aspect, the peptide is an amino acid sequence having 85% or more identity with SEQ ID NO 172 or a peptide derived therefrom. In one aspect, the peptide is an amino acid sequence having 85% or more identity with SEQ ID NO 173 or a peptide derived therefrom. In one aspect, the peptide is an amino acid sequence having 85% or more identity with SEQ ID NO 174 or a peptide derived therefrom. In one aspect, the peptide is an amino acid sequence having 85% or more identity with SEQ ID NO 175 or a peptide derived therefrom. In one aspect, the peptide is an amino acid sequence having 85% or more identity with SEQ ID NO 176 or a peptide derived therefrom. In one aspect, the peptide is an amino acid sequence having 85% or more identity with SEQ ID NO 177 or a peptide derived therefrom. In one aspect, the peptide is an amino acid sequence having 85% or more identity with SEQ ID NO 178 or a peptide derived therefrom. In one aspect, the peptide is an amino acid sequence having 85% or more identity with SEQ ID NO 179 or a peptide derived therefrom. In one aspect, the peptide is an amino acid sequence having 85% or more identity with SEQ ID NO 180 or a peptide derived therefrom. In one aspect, the peptide is an amino acid sequence having 85% or more identity with SEQ ID NO 181 or a peptide derived therefrom. In one aspect, the peptide is an amino acid sequence having 85% or more identity with SEQ ID NO 182 or a peptide derived therefrom. In one aspect, the peptide is an amino acid sequence having 85% or more identity with SEQ ID NO 183 or a peptide derived therefrom.

### (c) Cell Type

[0063] A method of the instant disclosure comprises determining the cell type of each infected cell. Cell type can be determined using methods know in the art. Non-limiting examples of methods used for determining cell type include the identification of cell markers and determining a transcriptional profile of a cell. In some aspects, the cell type is determined by identifying cell markers that distinguish unique cell types. Cell markers can be expressed both extracellularly on the cells surface or as an intracellular molecule. In other aspects, the cell type is determined by determining a transcriptional profile of a cell. The transcriptional profile of a cell can be determined using single cell sequencing of RNA transcripts (scRNA-seq). Standard methods such as microarrays and bulk RNA-seq analysis analyze the expression of RNAs from large populations of cells.

[0064] An engineered capsid protein of the instant disclosure exhibits preferential tropism to a desired cell type. The desired cell type can be an epithelial cell, a cell in an organ in the body, a cell in connective tissue, muscle tissue, and nervous tissue including the central nervous system and the peripheral nervous system, circulatory system, a cancer cell or tumor, or a cell of the immune system. In some aspects, the desired cell type is a cell in the central nervous system. Non-limiting examples of cell types in the nervous system include axons, oligodendrocytes, neuroblasts, neurons, glial cells, and astrocytes. In some aspects, the desired cell type is a cell of glial lineage. In some aspects, the desired cell type is a microglial cell. In other aspects, the desired cell type is an astrocyte.

[0065] In some aspects, the desired cell type is a cancer cell. The cancer cell can be a glioblastoma, colon cancer, ovarian cancer, breast cancer, prostate cancer, osteosarcoma, or malignant melanoma. Other non-limiting examples of neoplasms or cancer cells that may be suitable for use in methods of the instant disclosure include acute lymphoblastic leukemia, acute myeloid leukemia, adrenocortical carcinoma, AIDS-related cancers, AIDS-related lymphoma, anal cancer, appendix cancer, astrocytomas (childhood cerebellar or cerebral), basal cell carcinoma, bile duct cancer, bladder cancer, bone cancer, brainstem glioma, brain tumors (cerebellar astrocytoma, cerebral astrocytoma/malignant glioma, ependymoma, medulloblastoma, supratentorial primitive neuroectodermal tumors, visual pathway and hypothalamic gliomas), breast cancer, bronchial adenomas/carcinoids, Burkitt lymphoma, carcinoid tumors (childhood, gastrointestinal), carcinoma of unknown primary, central nervous system lymphoma (primary), cerebellar astrocytoma, cerebral astrocytoma/malignant glioma, cervical cancer, childhood cancers, chronic lymphocytic leukemia, chronic myelogenous leukemia, chronic myeloproliferative disorders, colon cancer, cutaneous T-cell lymphoma, desmoplastic small round cell tumor, endometrial cancer, ependymoma, esophageal cancer, Ewing's sarcoma in the Ewing family of tumors, extracranial germ cell tumor (childhood), extragonadal germ cell tumor, extrahepatic bile duct cancer, eye cancers (intraocular melanoma, retinoblastoma), gallbladder cancer, gastric (stomach) cancer, gastrointestinal carcinoid tumor, gastrointestinal stromal tumor, germ cell tumors (childhood extracranial, extragonadal, ovarian), gestational trophoblastic tumor, gliomas (adult, childhood brain stem, childhood cerebral astrocytoma, childhood visual pathway and hypothalamic), gastric carcinoid, hairy cell leukemia, head and neck cancer, hepatocellular (liver) cancer, Hodgkin lymphoma, hypopharyngeal cancer, hypothalamic and visual pathway glioma (childhood), intraocular melanoma, islet cell carcinoma, Kaposi sarcoma, kidney cancer (renal cell cancer), laryngeal cancer, leukemias (acute lymphoblastic, acute myeloid, chronic lymphocytic, chronic myelogenous, hairy cell), lip and oral cavity cancer, liver cancer (primary), lung cancers (non-small cell, small cell), lymphomas (AIDS-related, Burkitt, cutaneous T-cell, Hodgkin, non-Hodgkin, primary central nervous system), macroglobulinemia (Waldenström), malignant fibrous histiocytoma of bone/osteosarcoma, medulloblastoma (childhood), melanoma, intraocular melanoma, Merkel cell carcinoma, mesotheliomas (adult malignant, childhood), metastatic squamous neck cancer with occult primary, mouth cancer, multiple endocrine neoplasia syndrome (childhood), multiple myeloma/plasma cell neoplasm, mycosis fungoides, myelodysplastic syndromes, myelodysplastic/myeloproliferative diseases, myelogenous leukemia (chronic), myeloid leukemias (adult acute, childhood acute), multiple myeloma, myeloproliferative disorders (chronic), nasal cavity and paranasal sinus cancer, nasopharyngeal carcinoma, neuroblastoma, non-Hodgkin lymphoma, non-small cell lung cancer, oral cancer, oropharyngeal cancer, osteosarcoma/malignant fibrous histiocytoma of bone, ovarian cancer, ovarian epithelial cancer (surface epithelial-stromal tumor), ovarian germ cell tumor, ovarian low malignant potential tumor, pancreatic cancer, pancreatic cancer (islet cell), paranasal sinus and nasal cavity cancer, parathyroid cancer, penile cancer, pharyngeal cancer, pheochromocytoma, pineal astrocytoma, pineal germinoma, pineoblastoma and supratentorial primitive neuroectodermal tumors (childhood), pituitary adenoma, plasma cell neoplasia, pleuropulmonary blastoma, primary central nervous system lymphoma, prostate cancer, rectal cancer, renal cell carcinoma (kidney cancer), renal pelvis and ureter transitional cell cancer, retinoblastoma, rhabdomyosarcoma (childhood), salivary gland cancer, sarcoma (Ewing family of tumors, Kaposi, soft tissue, uterine), Sézary syndrome, skin cancers (nonmelanoma, melanoma), skin carcinoma (Merkel cell), small cell lung cancer, small intestine cancer, soft tissue sarcoma, squamous cell carcinoma, squamous neck cancer with occult primary (metastatic), stomach cancer, supratentorial primitive neuroectodermal tumor (childhood), T-Cell lymphoma (cutaneous), testicular cancer, throat cancer, thymoma (childhood), thymoma and thymic carcinoma, thyroid cancer, thyroid cancer (childhood), transitional cell cancer of the renal pelvis and ureter, trophoblastic tumor (gestational), unknown primary site (adult, childhood), ureter and renal pelvis transitional cell cancer, urethral cancer, uterine cancer (endometrial), uterine sarcoma, vaginal cancer, visual pathway and hypothalamic glioma (childhood), vulvar cancer, Waldenström macroglobulinemia, and Wilms tumor (childhood).

[0066] In some aspects, the desired cell type is an immune cell such as a lymphocytes, neutrophils, microglia, and monocytes/macrophages, or combinations thereof. In some aspects, the target cell or tissue type is monocytes or microglia.

### (d) Cell Infection

[0067] Cell infection methods for infecting cells with the rAAVs are known. For instance, the cells can be infected with the rAAVs by contacting the cells with the rAAVs. For instance, the cells can be tissue culture cells, and they can be contacted with the rAAVs by adding the rAAVs to the cell culture. The cells can also be infected by delivering to a subject in compositions according to any appropriate methods known in the art. The rAAV, preferably suspended in a physiologically compatible carrier (e.g., in a composition), may be administered to a subject, e.g., host animal, such as a human, mouse, rat, cat, dog, sheep, rabbit, horse, cow, goat, pig, guinea pig, hamster, chicken, turkey, or a non-human primate (e.g., Macaque).

[0068] Delivery of the rAAVs to a mammalian subject may be by, for example, intramuscular injection or by administration into the bloodstream of the mammalian subject. Administration into the bloodstream may be by injection into a vein, an artery, or any other vascular conduit. In some aspects, the rAAVs are administered into the bloodstream by way of isolated limb perfusion, a technique well known in the surgical arts, the method essentially enabling the artisan to isolate a limb from the systemic circulation prior to administration of the rAAV virions. A variant of the isolated limb perfusion technique can also be employed by the skilled artisan to administer the virions into the vasculature of an isolated limb to potentially enhance transduction into muscle cells or tissue. Moreover, in certain aspects, it may be desirable to deliver the virions to the CNS of a subject. By “CNS” is meant all cells and tissue of the brain and spinal cord of a vertebrate. Thus, the term includes, but is not limited to, neuronal cells, glial cells, astrocytes, cerebrospinal fluid (CSF), interstitial spaces, bone, cartilage and the like. Recombinant AAVs may be delivered directly to the CNS or brain by injection into, e.g., the ventricular region, as well as to the striatum (e.g., the caudate nucleus or putamen of the striatum), spinal cord and neuromuscular junction, or cerebellar lobule, with a needle, catheter or related device, using neurosurgical techniques known in the art, such as by stereotactic injection.

[0069] Suitable carriers may be readily selected by one of skill in the art in view of the indication for which the rAAV is directed. For example, one suitable carrier includes saline, which may be formulated with a variety of buffering solutions (e.g., phosphate buffered saline). Other exemplary carriers include sterile saline, lactose, sucrose, calcium phosphate, gelatin, dextran, agar, pectin, peanut oil, sesame oil, and water. The selection of the carrier is not a limitation of the disclosure.

[0070] Optionally, in addition to the rAAV and carrier(s), other conventional pharmaceutical ingredients can be included, such as preservatives or chemical stabilizers. Suitable exemplary preservatives include chlorobutanol, potassium sorbate, sorbic acid, sulfur dioxide, propyl gallate, the parabens, ethyl vanillin, glycerin, phenol, and parachlorophenol. Suitable chemical stabilizers include gelatin and albumin.

[0071] rAAVs are administered in sufficient amounts to transfect the cells of a desired tissue and to provide sufficient levels of gene transfer and expression without undue adverse effects. Conventional and pharmaceutically acceptable routes of administration include, but are not limited to, direct delivery to the selected organ (e.g., intraportal delivery to the liver), oral, inhalation (including intranasal and intratracheal delivery), intraocular, intravenous, intramuscular, subcutaneous, intradermal, intratumoral, and other parental routes of administration. Routes of administration may be combined, if desired.

[0072] In some aspects, rAAV compositions are formulated to reduce aggregation of AAV particles in the composition, particularly where high rAAV concentrations are present (e.g., ⁻10¹³ GC/ml or more). Methods for reducing aggregation of rAAVs are well known in the art and include, for example, addition of surfactants, pH adjustment, salt concentration adjustment, etc.

[0073] Formulation of pharmaceutically-acceptable excipients and carrier solutions is well known to those of skill in the art, as is the development of suitable dosing and treatment regimens for using the particular compositions described herein in a variety of treatment regimens. Typically, these formulations may contain at least about 0.1% of the active compound or more, although the percentage of the active ingredient(s) may, of course, be varied and may conveniently be between about 1 or 2% and about 70% or 80% or more of the weight or volume of the total formulation. Naturally, the amount of active compound in each therapeutically-useful composition may be prepared in such a way that a suitable dosage is obtained in any given unit dose of the compound. Factors such as solubility, bioavailability, biological half-life, route of administration, product shelf life, as well as other pharmacological considerations, are contemplated by one skilled in the art of preparing such pharmaceutical formulations, and as such, a variety of dosages and treatment regimens may be desirable.

[0074] In certain aspects, it is desirable to deliver the rAAV-based therapeutic constructs in suitably formulated pharmaceutical compositions disclosed herein either subcutaneously, intrapancreatically, intranasally, parenterally, intravenously, intramuscularly, intrathecally, or orally, intraperitoneally, or by inhalation. In some aspects, the cells are infected with the rAAVs by administering the rAAVs to a subject in a pharmaceutically-acceptable carrier to the subject in an amount and for a period of time sufficient to infect the cells. For instance, the rAAVs can be administered parenterally into the subject. When the cells are neural cells, including microglial cells, the rAAVs can be administered by injection into the striatum.

[0075] Pharmaceutical forms suitable for injectable use can include sterile aqueous solutions or dispersions and sterile powders for the extemporaneous preparation of sterile injectable solutions or dispersions. Dispersions may also be prepared in glycerol, liquid polyethylene glycols and mixtures thereof, and in oils. Under ordinary conditions of storage and use, these preparations contain a preservative to prevent the growth of microorganisms. In many cases the form is sterile and fluid to the extent that easy syringability exists. It must be stable under the conditions of manufacture and storage and must be preserved against the contaminating action of microorganisms, such as bacteria and fungi. The carrier can be a solvent or dispersion medium containing, for example, water, ethanol, polyol (e.g., glycerol, propylene glycol, and liquid polyethylene glycol, and the like), suitable mixtures thereof, and/or vegetable oils. Proper fluidity may be maintained, for example, by the use of a coating, such as lecithin, by the maintenance of the required particle size in the case of dispersion and by the use of surfactants. The prevention of the action of microorganisms can be brought about by various antibacterial and antifungal agents, for example, parabens, chlorobutanol, phenol, sorbic acid, thimerosal, and the like. In many cases, it is preferable to include isotonic agents, for example, sugars or sodium chloride. Prolonged absorption of the injectable compositions can be brought about by the use in the compositions of agents delaying absorption, for example, aluminum monostearate and gelatin.

[0076] For administration of an injectable aqueous solution, for example, the solution may be suitably buffered, if necessary, and the liquid diluent first rendered isotonic with sufficient saline or glucose. These particular aqueous solutions are especially suitable for intravenous, intramuscular, subcutaneous and intraperitoneal administration. In this connection, a sterile aqueous medium that can be employed is known to those of skill in the art. For example, one dosage may be dissolved in 1 ml of isotonic NaCl solution and either added to 1000 ml of hypodermoclysis fluid or injected at the proposed site of infusion. Some variation in dosage may necessarily occur depending on the condition of the host.

[0077] Sterile injectable solutions can be prepared by incorporating the active rAAV in the required amount in the appropriate solvent with various of the other ingredients enumerated herein, as required, followed by filtered sterilization. Generally, dispersions are prepared by incorporating the various sterilized active ingredients into a sterile vehicle which contains the basic dispersion medium and the required other ingredients from those enumerated above. In the case of sterile powders for the preparation of sterile injectable solutions, the preferred methods of preparation are vacuum-drying and freeze-drying techniques which yield a powder of the active ingredient, plus any additional desired ingredient from a previously sterile-filtered solution thereof.

[0078] rAAVs can also be formulated in a neutral or salt form. Pharmaceutically-acceptable salts include the acid addition salts (formed with the free amino groups of the protein) and which are formed with inorganic acids such as, for example, hydrochloric or phosphoric acids, or such organic acids as acetic, oxalic, tartaric, mandelic, and the like. Salts formed with the free carboxyl groups can also be derived from inorganic bases such as, for example, sodium, potassium, ammonium, calcium, or ferric hydroxides, and such organic bases as isopropylamine, trimethylamine, histidine, procaine and the like. Upon formulation, solutions are administered in a manner compatible with the dosage formulation and in such amount as is therapeutically effective. The formulations are easily administered in a variety of dosage forms such as injectable solutions, drug-release capsules, and the like.

[0079] As used herein, “carrier” includes any and all solvents, dispersion media, vehicles, coatings, diluents, antibacterial and antifungal agents, isotonic and absorption delaying agents, buffers, carrier solutions, suspensions, colloids, and the like. The use of such media and agents for pharmaceutical active substances is well known in the art. Supplementary active ingredients can also be incorporated into the compositions. The phrase “pharmaceutically-acceptable” refers to molecular entities and compositions that do not produce an allergic or similar untoward reaction when administered to a host.

[0080] Delivery vehicles such as liposomes, nanocapsules, microparticles, microspheres, lipid particles, vesicles, and the like, may be used for the introduction of the compositions of the disclosure into suitable host cells. In particular, the rAAV vector delivered transgenes may be formulated for delivery either encapsulated in a lipid particle, a liposome, a vesicle, a nanosphere, or a nanoparticle or the like.

### (e) Reporters

[0081] The transgene may also include a nucleic acid sequence encoding a reporter molecule. As used herein, the term “reporter” refers to any biomolecule that may be used as an indicator of transcription and/or translation through a promoter. A reporter may be a polypeptide. A reporter may also be a nucleic acid. Suitable polypeptide and nucleic acid reporters are known in the art, and may include visual reporters, selectable reporters, screenable reporters, and combinations thereof. Other types of reporters will be recognized by individuals of skill in the art.

[0082] Visual reporters typically result in a visual signal, such as a color change in the cell, or fluorescence or luminescence of the cell. Suitable visual reporters include fluorescent proteins, visible reporters, epitope tags, affinity tags, RNA aptamers, and the like. Non-limiting examples of suitable fluorescent proteins include green fluorescent proteins (e.g., GFP, GFP-2, tagGFP, turboGFP, EGFP, Emerald, Azami Green, Monomeric Azami Green, CopGFP, AceGFP, ZsGreen1), yellow fluorescent proteins (e.g., YFP, EYFP, Citrine, Venus, YPet, PhiYFP, ZsYellow1), blue fluorescent proteins (e.g., EBFP, EBFP2, Azurite, mKalama1, GFPuv, Sapphire, T-sapphire), cyan fluorescent proteins (e.g., ECFP, Cerulean, CyPet, AmCyan1, Midoriishi-Cyan), red fluorescent proteins (e.g., mKate, mKate2, mPlum, DsRed monomer, mCherry, mRFP1, DsRed-Express, DsRed2, DsRed-Monomer, HcRed-Tandem, HcRed1, AsRed2, eqFP611, mRasberry, mStrawberry, Jred), and orange fluorescent proteins (e.g., mOrange, mKO, Kusabira-Orange, Monomeric Kusabira-Orange, mTangerine, tdTomato), or any other suitable fluorescent protein. Non-limiting examples of visual reporters include luciferase, alkaline phosphatase, beta-glucuronidase (GUS), beta-galactosidase, beta-lactamase, horseradish peroxidase, anthocyanin pigmentation, and variants thereof. Suitable epitope tags include, but are not limited to, myc, AcV5, AU1, AU5, E, ECS, E2, FLAG, HA, Maltose binding protein, nus, Softag 1, Softag 3, Strep, SBP, Glu-Glu, HSV, KT3, S, S1, T7, V5, VSV-G, 6×His, BCCP, and calmodulin. Non-limiting examples of affinity tags include chitin binding protein (CBP), thioredoxin (TRX), poly(NANP), tandem affinity purification (TAP) tag, and glutathione-S-transferase (GST). Non-limiting examples of RNA aptamers include fluorescent RNA aptamers that sequester small molecule dyes and activate their fluorescence.

[0083] Other visual reporters may include fluorescent resonance energy transfer (FRET), lanthamide resonance energy transfer (LRET), fluorescence cross-correlation spectroscopy, fluorescence quenching, fluorescence polarization, scintillation proximity, chemiluminescence energy transfer, bioluminescence resonance energy transfer, excimer formation, phosphorescence, electrochemical changes, molecular beacons, and redox potential changes.

[0084] It will be recognized that combinations of reporters may be used. For instance, a visual reporter fused to a protein expressed by the gene of interest may be used to identify an accurate homologous recombination event, but the visual reporter is not permanently fused to the protein. A second reporter may be used in combination with the visual reporter, wherein the second reporter is permanently fused to the protein.

[0085] Additionally, irrespective of the reporter used in a transgene, the reporter may be a split reporter system. Split reporter systems may be used to reduce the size of a reporter sequence in a transgene. Non-limiting examples of suitable split reporter systems include split GFP systems, split 5-EnolpyruvylShikimate-3-Phosphate Synthase for glyphosate resistance, among others. Similarly, irrespective of the reporter used, a transgene may encode an activator for activating a reporter encoded in a location other than the AAV vector.

II. rAAV Libraries

[0086] The present disclosure also encompasses a library of rAAVs comprising a plurality of rAAV members. Each rAAV member comprises an engineered AAV capsid protein encapsidating an AAV vector, wherein the AAV vector has AAV inverted terminal repeats (ITRs) flanking a transgene and an identifier sequence unique to the capsid protein of each rAAV. Each engineered AAV capsid protein exhibits preferential tropism to a select cell type. The number of rAAVs in a library can and will differ depending on the number of engineered capsid proteins and the population of cells to be infected by rAAV members of the library among other variables.

[0087] A viral library of the instant disclosure can be generated as described in Example 2 and outlined in FIG. 2 of the instant disclosure. In short, a cloning plasmid is constructed containing the following key features: 1) AAV genes housed outside the ITRs ensuring that serial infectivity cannot occur during virus production. 2) Unidirectional LoxP sites are introduced immediately downstream of the AAV cap gene encoding a genetically engineered capsid protein and immediately upstream of a unique identifier. The cloning plasmid is constructed using methodology designed to maximize diversity whilst retaining complete unambiguity (i.e. 1 identifier=1 capsid variant), and to ensure fidelity of barcode/microglial ligand sequencing (Example 2).

[0088] The library is duplicated and one copy is subjected to CRE recombinase treatment which brings the barcode and ML into close range. Upon CRE-mediated recombination, a fragment is excised, bringing the identifier and engineered mutations in the capsid protein in close proximity. This facilitates sequencing of the identifier together with the ligand sequence in order to build a reference database having each identifier matched with one engineered capsid protein, or a mutation in the engineered capsid protein that confers preferential tropism to the engineered protein.

[0089] A second copy of the library is utilized for generation of a library of rAAVs comprising the viral vector on the plasmid and the mutated capsid protein. In some aspects, infection conditions used for rAAV production during library ensure that each production cell (e.g., HEK 293 cell) contains only one version of the cap gene to ascertain that the infectivity of a specific capsid is related to a specific genome.

[0090] After infection of a population of cells with the library of rAAVs, single cell RNA sequencing is utilized to identify the profile of infected cells and associated identifier. Genomics is utilized to generate a database where the cellular profile, identifier, and the engineered capsid protein of each rAAV are linked. Accordingly, the identifier, the engineered capsid protein, the cellular profile of each rAAV of the library are known and can be queried to identify capsids that only transduce certain cell-types, in this case microglia (See Section IV herein below).

### III. Nucleic Acid Libraries

[0091] The present disclosure also provides a library of nucleic acid constructs encoding a library of rAAVs comprising a plurality of rAAV members. Nucleic acid constructs comprise the AAV vector comprising the identifier sequence, and further comprising a gene encoding the engineered capsid protein. The present disclosure also provides a library of cloning plasmids used to prepare the nucleic acid constructs encoding a library of rAAVs comprising a plurality of rAAV members. The library of rAAVs and cloning plasmids can be as described in Section II herein above.

[0092] Any of the nucleic acid constructs described herein are to be considered modular, in that the different components may optionally be distributed among two or more nucleic acid constructs as described herein. The nucleic acid constructs may be DNA or RNA, linear or circular, single-stranded or double-stranded, or any combination thereof. The nucleic acid constructs may be codon optimized for efficient translation into protein, and possibly for transcription into an RNA donor polynucleotide transcript in the cell of interest. Codon optimization programs are available as freeware or from commercial sources.

[0093] The nucleic acid constructs can be used to express one or more components of the system for later introduction into a cell to be genetically modified. Alternatively, the nucleic acid constructs can be introduced into the cell to be genetically modified for expression of the components of the system in the cell.

[0094] Expression constructs generally comprise DNA coding sequences operably linked to at least one promoter control sequence for expression in a cell of interest. Promoter control sequences may control expression of the engineered capsid protein, the AAV vector, or combinations thereof in bacterial (e.g., E. coli) cells or eukaryotic (e.g., yeast, insect, mammalian, or plant) cells. Suitable bacterial promoters include, without limit, T7 promoters, lac operon promoters, trp promoters, tac promoters (which are hybrids of trp and lac promoters), variations of any of the foregoing, and combinations of any of the foregoing. Non-limiting examples of suitable eukaryotic promoters include constitutive, regulated, or cell- or tissue-specific promoters. Suitable eukaryotic constitutive promoter control sequences include, but are not limited to, cytomegalovirus immediate early promoter (CMV), simian virus (SV40) promoter, adenovirus major late promoter, Rous sarcoma virus (RSV) promoter, mouse mammary tumor virus (MMTV) promoter, phosphoglycerate kinase (PGK) promoter, elongation factor (ED1)-alpha promoter, ubiquitin promoters, actin promoters, tubulin promoters, immunoglobulin promoters, fragments thereof, or combinations of any of the foregoing. Examples of suitable eukaryotic regulated promoter control sequences include, without limit, those regulated by heat shock, metals, steroids, antibiotics, or alcohol. Non-limiting examples of tissue-specific promoters include B29 promoter, CD14 promoter, CD43 promoter, CD45 promoter, CD68 promoter, desmin promoter, elastase-1 promoter, endoglin promoter, fibronectin promoter, Flt-1 promoter, GFAP promoter, GPIIb promoter, ICAM-2 promoter, INF-β promoter, Mb promoter, NphsI promoter, OG-2 promoter, SP-B promoter, SYN1 promoter, and WASP promoter.

[0095] Promoters can be constitutive promoters or non-constitutive promoters, including regulated promoters. Promoters can also be tissue-specific, e.g., promoters specific to neural tissue. Any of the promoter sequences may be wild type or may be modified for more efficient or efficacious expression. The DNA coding sequence also may be linked to a polyadenylation signal (e.g., SV40 polyA signal, bovine growth hormone (BGH) polyA signal, etc.) and/or at least one transcriptional termination sequence.

### IV. Computer-Implemented Methods and Systems

[0096] The present disclosure also encompasses a computer-implemented method for identifying a rAAV exhibiting preferential tropism to a desired cell type. The method comprises providing or having provided a computerized system comprising a general purpose computer system having at least one processor and computer readable memory storing a database of tropism properties exhibited by a plurality of engineered AAV capsid proteins. Tropism properties include information on the ability of an rAAV of the library to transduce certain cell types, and the inability of the rAAV to transduce remaining cell types. The engineered capsid proteins may be prepared as described in Section II and the tropism properties exhibited by each engineered AAV capsid protein can be determined as described in Section I.

[0097] The computerized system further comprises a computer readable medium comprising functional modules including instructions for the general purpose computer which when executed by the at least one processor, cause the at least one processor to query the database and select among the plurality of engineered AAV capsid proteins a capsid protein exhibiting tropism to a desired cell type. The database can further comprise a plurality of cell-type-specific transcriptional profile information associated with each cell type, and a plurality of nucleic acid sequences, each sequence encoding a unique engineered AAV capsid protein. The database can further comprise a plurality of identifier sequences, wherein each identifier is unique to a nucleic acid sequence encoding a unique engineered AAV capsid protein. The tropism properties, the sequence of the identifier, and the cellular profile of each rAAV in the library are linked in the database, and can be queried to identify capsids that only transduce certain cell-types, but fail to transduce other cell types.

[0098] In one aspect, the system also comprises an interface unit to display an output of a query. The interface unit may be, for example a display device such as, but not limited to a CRT (cathode ray tube) or LCD (liquid crystal display) monitor. The display device can display information to the user and may include or be in operative communication with an input device such as a keyboard, touchscreen, and/or pointing device (e.g., a mouse or a trackball). An input device may alternatively or in addition, be configured to receive and transmit a signal based on other types of user input, such as voice instruction, or body movement.

[0099] It should be understood that the disclosed methods, method steps and/or processor-executable instructions can be implemented or executed by means of any digital electronic system, computer hardware, firmware, software, or any combinations thereof. A processor may take the form of a programmable processor, a computer, or multiple computers, which may be programmed to perform the disclosed methods using any programming language. A program of instructions may comprise a stand-alone program or may have two or more modules, components, subroutines, or the like as known in the art of computer programming. Method steps can be performed by one or more programmable processors executing a computer program to perform functions or aspects of the methods, by operating on input data and generating output information.

[0100] A processor may be configured, by way of processor-executable instructions, to receive instructions and data from a memory device, which can be configured for storing instructions and data. A processor, or a computer containing a processor, may be in operative communication with at least one or more mass storage devices for storing data (e.g., magnetic, magneto-optical disks, or optical disks), such that the processor can receive data from or transfer data to such storage device(s). For example, data and/or instruction communications can be performed over a digital communications network.

[0101] It should be further understood that the disclosed methods, method steps and/or processor-executable instructions can be performed by a distributed computing system. A distributed computing system includes, for example, a front-end (user-end) interface, middleware, and a back-end, or any combination of two or more of these elements. A front-end component can be, for example, a client computer configured by way of processor-executable instructions to display a graphical user interface through which a user can interact with and provide input to the system. An interface can be embodied in a Web browser interface. A middleware component can be, for example, an application server. A back-end component can be, for example, a data server. Any or all of the components of such a distributed system can be in operative communication by way of one or more digital communications networks, which may be wired and/or wireless networks.

### V. Optimizing Delivery of a Transgene to a Desired Cell Type in a Population

[0102] The present disclosure also encompasses a method of optimizing delivery of a transgene to a desired cell type in a population of more than one cell type. The method comprises identifying or having identified an engineered AAV capsid protein exhibiting preferential tropism to the desired cell type. The engineered AAV capsid protein exhibiting preferential tropism to the desired cell type can be identified using a method described in Section I, or can be queried in silico using a system described in Section IV.

[0103] The method further comprises transducing a population of cells comprising the desired cell type with an rAAV comprising the identified engineered AAV capsid protein to thereby deliver the transgene to the desired cell type. A cell of the desired target cell type can be a central nervous system cell. In some aspects, the desired target cell type is a microglial cell. In some aspects, the desired target cell type is an astrocyte. The desired cell type can be in a cell culture, an ex vivo tissue, or can be in a subject. For instance, the cell type can be in an aged and diseased primate, in human brain tissue, including post mortem brain/spinal cord tissue kept alive for a few weeks, or from resected tissue from epilepsy patients.

### VI. Kits

[0104] The present disclosure also encompasses a kit for identifying or generating engineered AAV capsid proteins exhibiting tropism to a desired target cell type. A kit comprises a library of rAAVs as described in Section II, a library of nucleic acid constructs as described in Section III, or a plurality of cells comprising a library of rAAVs, a library of nucleic acid constructs, or combinations thereof.

[0105] The kits may further comprise transfection and transduction reagents, cell growth media, selection media, in vitro transcription reagents, nucleic acid purification reagents, protein purification reagents, buffers, and the like. The kits provided herein generally include instructions for carrying out the methods detailed below. Instructions included in the kits may be affixed to packaging material or may be included as a package insert. While the instructions are typically written or printed materials, they are not limited to such. Any medium capable of storing such instructions and communicating them to an end user is contemplated by this disclosure. Such media include, but are not limited to, electronic storage media (e.g., magnetic discs, tapes, cartridges, chips), optical media (e.g., CD ROM), and the like. As used herein, the term “instructions” may include the address of an internet site that provides the instructions.

### Definitions

[0106] Unless defined otherwise, all technical and scientific terms used herein have the meaning commonly understood by a person skilled in the art to which this invention belongs. The following references provide one of skill with a general definition of many of the terms used in this invention: Singleton et al., Dictionary of Microbiology and Molecular Biology (2nd ed. 1994); The Cambridge Dictionary of Science and Technology (Walker ed., 1988); The Glossary of Genetics, 5th Ed., R. Rieger et al. (eds.), Springer Verlag (1991); and Hale & Marham, The Harper Collins Dictionary of Biology (1991). As used herein, the following terms have the meanings ascribed to them unless specified otherwise.

[0107] When introducing elements of the present disclosure or the preferred aspects(s) thereof, the articles “a”, “an”, “the” and “said” are intended to mean that there are one or more of the elements. The terms “comprising”, “including” and “having” are intended to be inclusive and mean that there may be additional elements other than the listed elements.

[0108] Methods according to the above can be implemented using computer-executable instructions that are stored or otherwise available from computer readable media. Such instructions can comprise, for example, instructions and data which cause or otherwise configure a general purpose computer, special purpose computer, or special purpose processing device to perform a certain function or group of functions. Portions of computer resources used can be accessible over a network. The computer executable instructions may be, for example, binaries, intermediate format instructions such as assembly language, firmware, or source code. Examples of computer-readable media that may be used to store instructions, information used, and/or information created during methods according to described examples include magnetic or optical disks, flash memory, USB devices provided with non-volatile memory, networked storage devices, and so on.

[0109] Devices implementing methods according to these disclosures can comprise hardware, firmware and/or software, and can take any of a variety of form factors. Typical examples of such form factors include laptops, smart phones, small form factor personal computers, personal digital assistants, rackmount devices, standalone devices, and so on. Functionality described herein also can be embodied in peripherals or add-in cards. Such functionality can also be implemented on a circuit board among different chips or different processes executing in a single device, by way of further example.

[0110] The instructions, media for conveying such instructions, computing resources for executing them, and other structures for supporting such computing resources are means for providing the functions described in these disclosures.

[0111] As used herein, the term “library” refers to a collection of entities, such as, for example, chimeric capsid proteins, viral particles (e.g., rAAVs), molecules (e.g., nucleic acids), etc. A library may comprise at least two, at least three, at least four, at least five, at least ten, at least 25, at least 50, at least 102, at least 10³, at least 10⁴, at least 10⁵, at least 10⁶, at least 10⁷, at least 10⁸, at least 10⁹, or more different entities (e.g., viral particles, molecules (e.g., nucleic acids)). In some aspects, a library entity (e.g., a viral particle, a nucleic acid) can be associated with or linked to a tag (e.g., a barcode), which can facilitate recovery or identification of the entity. For example, in some aspects, libraries provided herein comprise a collection of rAAVs and libraries of nucleic acid compositions encoding the rAAVs. In some aspects, a library refers to a collection of nucleic acids that are propagatable, e.g., through a process of clonal amplification. Library entities can be stored, maintained or contained separately or as a mixture.

[0112] A transgene is a gene that has been transferred naturally, or by any of a number of genetic engineering techniques from one organism to another. The introduction of a transgene, in a process known as transgenesis, has the potential to change the phenotype of an organism. Transgene describes a segment of DNA containing a gene sequence that has been isolated from one organism and is introduced into a different organism. This non-native segment of DNA may either retain the ability to produce RNA or protein in the transgenic organism or alter the normal function of the transgenic organism's genetic code. In general, the DNA is incorporated into the organism's germ line.

[0113] As used herein, the term “gene” refers to a segment of DNA that contains all the information for the regulated biosynthesis of an RNA product, including promoters, exons, introns, and other untranslated regions that control expression.

[0114] As used herein, “expression” includes but is not limited to one or more of the following: transcription of the gene into precursor mRNA; splicing and other processing of the precursor mRNA to produce mature mRNA; mRNA stability; translation of the mature mRNA into protein (including codon usage and tRNA availability); and glycosylation and/or other modifications of the translation product, if required for proper expression and function.

[0115] As used herein, the term “mutant” means any heritable variation from the wild-type that is the result of a mutation, e.g., single nucleotide polymorphism (“SNP”). The term “mutant” is used interchangeably with the terms “marker”, “biomarker”, and “target” throughout the specification.

[0116] The terms “polypeptide” and “protein” are used interchangeably to refer to a polymer of amino acid residues.

[0117] As used herein, the term “encode” is understood to have its plain and ordinary meaning as used in the biological fields, i.e., specifying a biological sequence. The term “encode,” when used to describe the function of nucleic acid molecules, customarily means to identify one single amino acid sequence that makes up a unique polypeptide, or one nucleic acid sequence that makes up a unique RNA. That function is implemented by the particular nucleotide sequence of each nucleic acid molecule.

[0118] As various changes could be made in the above-described cells and methods without departing from the scope of the invention, it is intended that all matter contained in the above description and in the examples given below, shall be interpreted as illustrative and not in a limiting sense.

### EXAMPLES

[0119] All patents and publications mentioned in the specification are indicative of the levels of those skilled in the art to which the present disclosure pertains. All patents and publications are herein incorporated by reference to the same extent as if each individual publication was specifically and individually indicated to be incorporated by reference.

[0120] The publications discussed throughout are provided solely for their disclosure before the filing date of the present application. Nothing herein is to be construed as an admission that the invention is not entitled to antedate such disclosure by virtue of prior invention.

[0121] The following examples are included to demonstrate the disclosure. It should be appreciated by those of skill in the art that the techniques disclosed in the following examples represent techniques discovered by the inventors to function well in the practice of the disclosure. Those of skill in the art should, however, in light of the present disclosure, appreciate that many changes could be made in the disclosure and still obtain a like or similar result without departing from the spirit and scope of the disclosure, therefore all matter set forth is to be interpreted as illustrative and not in a limiting sense.

### Example 1. Introduction

[0122] The role of microglia in the CNS can be studied using inducible (e.g., tamoxifen-dependent CRE recombinase) transgenic animals. Such approaches lack a certain degree of control. For instance, dosing of the transgene is fixed and constitutive once induced. In contrast, in a regulatable vector system the level of transgene expression can be modulated based on the administration of, for instance, doxycycline. Unfortunately, the use of inducible promoters in a CRE-dependent fashion is not straightforward as such cassettes contain multiple genetic elements and promoters. A CRE system also does not provide simple and efficient control of all types of genetic elements. For instance, small RNAs such as short hairpin RNAs or guide RNAs for CRISPR applications are typically expressed via polymerase (pol) III promoters, and such transcription cassettes cannot be controlled in the same fashion, and the use of pol II promoters have certain limitations in these applications (e.g. imprecise start of transcription). Moreover, this type of manipulation is limited to species where transgenesis is feasible (i.e. mainly mice and rats). However, perhaps the biggest barriers to using transgenic animals to specifically study CRE-mediated genetic manipulations are in situations where genetic manipulations are desired in multiple phenotypically distinct cell types (e.g. microglia and neurons). For instance, the use of the CX3CR1CreER mouse where CRE is expressed specifically in microglia could not be combined with a neuron-specific CRE mouse, as this would ablate any precision of genetic modulation that each animal confers on its own.

[0123] Another modality whereby microglia could be manipulated is viral gene therapy. Nonetheless, lentiviruses (LV) transduce microglia with rather low efficacy in vivo, and adeno-associated viruses (AAV) have proven to be remarkably refractory to microglial transduction. AAV viral vectors that specifically transduce microglia are generated and identified. The inventors have shown (FIG. 1) that there is no biological rationale for this apparent inability of AAVs to effectively target microglia. The AAV capsids utilized in FIG. 1 were generated using “directed” molecular evolution of AAV. This is a popular method whereby AAV variants are selected from large engineered AAV capsid libraries with high diversity, using a positive selection marker. The approach that led up to identification of the capsids utilized in FIG. 1 was based on viral library enhanced with presynaptic ligands, aimed at producing variants with enhanced retrograde transport. Thus far, however, negative selection in the classic sense has not been possible. Therefore, cell specific targeting is not guaranteed (e.g. identified AAV variant that can target microglia, also targets neurons; FIG. 1). To address this technical problem, the inventors provide a novel workflow in which 1) a library of barcoded AAVs targeted to microglia are generated by the incorporation of microglial ligands in to the capsid of AAV2; 2) single cell RNAseq of the transduced mouse brain are used to identify the profile of individual cells transduced by AAVs and the corresponding barcodes; 3) bioinformatics are used as a means to apply “in silico negative selection” against variants (barcodes) that are also present in cell types that are undesirable to target (e.g., allowing us to identify capsids present in microglia but not neurons). This approach builds a large database that delineates the transduction properties of a large number of AAV variants. 4) The utility of this new vector is demonstrated in the context of studying microglial function, and in experimentation that would historically not be possible using classic CRE-based manipulations. In doing so, the investigation is extended to determining if region-specific modulation of microglial epigenetic regulation results in local changes of neuronal excitability of corticostriatal networks. 5) In parallel, experiments expand this approach across species (non-human primates) and across age (aged rodents). Moreover, although the examples herein discuss microglia, the database generated can be queried against barcodes (i.e. capsids) that are specific for subsets of neurons or other non-neuronal cells, providing a large repository of potential cell-specific AAV variants, an extremely powerful tool for the study of the nervous system.

[0124] Advantages of AAV over existing technologies to study microglia function in vivo. Manipulating “resting” microglia has proven to be relatively difficult, as these cells readily respond to miniscule changes in their environment. It may thus be difficult to resolve whether the true consequence following a certain manipulation is due to a specific effect on a microglial process, or a generalized response to the changing environment. Nevertheless, the use of transgenic technology such as the CX3CR1 CreER mouse, the current state-of-the-art technology, has allowed a significantly improved resolution as it relates to microglial manipulations, and has provided a crucial backdrop for an improved understanding of microglial function. Yet, the use of such technology, although representing a significant step forward, still has several limitations, most of which can be overcome by the development of a microglia-specific AAV vector. Perhaps the most significant limitation to using a model such as the CX3CR1^{CreER} is that its use still limits the use of intersectional approaches to restrict ectopic expression to molecularly-defined subsets of cells. For instance, this model would not be suited when two or more distinct CRE recombinase-mediated events are needed (e.g. neuron-specific CRE together with microglia-specific CRE). However, with the utility of specific viral vectors, such distinction and precision can be achieved. This utility is demonstrated by combining a microglial specific AAV in animals where neuron-specific CRE expression is labeling neurons and dendrites with YFP. While tamoxifen-based CRE systems allow temporal control of gene expression, it does not provide dose control (i.e. once the recombination event has taken place, gene expression is persistently turned on or off). When used in combination with CRE-dependent AAV vectors (aka “FLEX” vector), the use of various titers allows for some dose control. However, this system lacks the control that can be achieved with a regulatable vector system. For instance, it does not afford a researcher the ability to change the level of expression throughout the course of experimentation. Spatial control of gene expression using CRE expressing transgenics can only be achieved when used in conjunction with CRE-dependent vector systems. On the other hand, the use of ectopically applied CRE-ER (e.g. AAV mediated expression of CRE-ER on a floxed transgenic model) is useful in order to spatially restrict recombination. In both cases, the ability to achieve such manipulations in microglia requires microglial-specific vectors. A minor concern would be potential confounds associated with leakiness of CRE systems, mosaicism, and any toxicity and off-target effects with CRE and/or tamoxifen. Thus, with this in mind, if a single manipulation needs to be made, virally-mediated gene-delivery may add less confound to the study design. One benefit of having the ability to utilize microglia-specific vectors, even for single manipulations, is that it negates the necessity to generate new lines of mice and affords researchers faster and more economical means to gather data. Finally, in the available microglia-specific transgenic mice CX3CR1^{Cre} and CX3CR1^{CreER}, the CRE gene is inserted in place of the CX3CR1 gene, rendering it haploinsufficient for CX3CR1. This, in and of itself, leads to significant changes in plasticity and behavioral phenotypes, making this mouse less than ideal for certain types of experimentation.

[0125] Rationale for molecular evolution. Molecular or directed evolution has been tremendously useful in developing novel viral capsids with unique features. However, existing procedures do not allow for a biological process of negative pressure or selection. Rather, often the selection of the terminal capsids identified in these works has been based on extensive testing of numerous variants in order to select for those capsids that produce the lowest degree of a certain off-target activity. In contrast, genomics and bioinformatics are used in order to achieve de facto in silico negative selection.

[0126] Moreover, in contrast to previously described methods, a novel method is proposed herein for rational capsid evolution incorporating DNA barcoding. This method keeps all the benefits of rational design while maintaining the broad screening capacity of directed evolution. The novel feature of this method is a viral production approach where each virus particle displays a peptide (from microglial ligands) on the surface which is linked to a unique DNA barcode included in the genome. By design, this method allows for the simultaneous screening of millions of capsid variants in parallel. The screening method only requires a single round of screening, thus the method requires fewer animals and shorter time than existing screening methods.

[0127] AAV has remained remarkably refractory to transducing microglia. To date, very little has been reported in terms of strong microglial transduction using AAV. In recent preliminary work using a library approach similar to the one described herein, capsid variants with strong microglial tropism were identified by the inventors (see FIG. 1). Importantly, this finding demonstrates that there is no biological barrier for infecting microglia with AAV. Nevertheless, negative selection in the realm of molecular evolution has not yet been achieved in the study shown in FIG. 1, where the aim was to identify capsids preferentially targeting presynaptic neurons. Accordingly, identified capsids targeted multiple cell-types with high affinity (FIG. 1).

[0128] Role of microglia in synapses. Historically, microglia were considered the “garbage-collecting” cell of the CNS, with a pronounced role in phagocytosis of cell debris, misfolded proteins, and clearance of pathogens. However, it is now evident that microglia plays a significant and crucial role in the formation of neuronal connections and networks throughout the lifespan of an organism. During development, microglia modulate neuronal circuitry through phagocytosis of synapses and “unneeded” neurons. This role of microglia persists past development where synaptic pruning is observed in adulthood. This activity occurs in response to a variety of signaling. Indeed, microglia express a variety of receptors for neurotransmitters and other neuromodulators. Thus, neuronal activity is thought to be a key modulator of the role of microglia in synapse and network formation. Importantly, recent evidence demonstrates regional epigenetic differences throughout the brain, differences which modulate microglial activity in the different regions.

[0129] Polycomb repressive complex 2 (PRC2) and microglial activity. As eluded to above, microglia exhibit region-specific differences. For instance, striatal microglia have a homeostatic phenotype whereas cerebellar microglia display a clearance phenotype. These phenotypes are epigenetically controlled, where the suppression of the clearance phenotype in striatal microglia is controlled by PRC2. Aberrant deactivation of PRC2 in striatal microglia results in a marked change in the morphology of striatal medium spiny neurons (MSN) and MSN-controlled behavior, the likely result of maladaptive spine pruning, and a reduction in expression of genes that promote spine formation and maintenance. Interestingly, however, PRC2 is also important in neuronal differentiation and function. Silencing of PRC2 in MSN results in the activation of a transcriptional program that results in a neuronal death and neurodegeneration, whereas in other neuronal population drastic changes in dendritic complexity is observed. Thus, modulation of the activity of this complex can have disparate consequences depending on the cell-type targeted.

### Example 2. Guided Molecular Evolution of AAV Paired with Single Cell Bioinformatics and Validation in the Rodent

### Generation of Viral Library.

[0130] Viral genome. The wildtype (wt) AAV genome contains two genes: rep (encoding replication proteins) and cap (encoding capsid proteins). The capsid is highly conserved between various natural serotypes, and differs largely in variable regions (VR), areas responsible for cellular receptor binding and subsequent internalization. In AAV2, one such VR is encoded beginning at cap R588, which represents a highly flexible loop which can tolerate insertions of poly-peptides without compromising virion structure or production. FIG. 2 outlines the steps involved in the generation of the barcoded viral genome library. Importantly, insertion at this site disrupts the canonical entry mediated via HSPG binding.

[0131] Cloning backbone: FIG. 2 shows a schematic of the cloning system. The plasmid contains key features which include: 1) Cleavage site at R588 to facilitate the insertion of oligonucleotides encoding a short poly-peptide sequence (14 amino acids (AA)), based on microglial ligands (see below). 2) AAV genes are housed outside the iTRs ensuring that serial infectivity cannot occur during virus production. 3) Unidirectional LoxP sites are introduced immediately downstream of cap and immediately upstream of the barcode. Upon CRE-mediated recombination a fragment (containing the upstream iTR) is excised, bringing barcode and ligand insertion sites in close proximity. This facilitates paired-end Illumina sequencing of the barcode together with the ligand sequence in order to build a reference database (1 barcode associated with 1 ligand). RNAseq of the viral genome is done by 4) sequencing of a transcribed mRNA (i.e. GFP) isolated from single nuclei.

[0132] Library generation (FIG. 2). The barcoded viral genomes were assembled using standard Gibson cloning methodology (FIG. 2—Step 1). The outlined cloning schema is designed to maximize diversity whilst retaining complete unambiguity (i.e. 1 barcode=1 capsid variant), and to ensure fidelity of barcode/microglial ligand sequencing.

[0133] Selection of Microglial Ligands (ML). MLs belonging to two classes were identified: 1) Ligands with known microglial receptors (e.g. LAG-3-associated protein, interferon-γ); and 2) Ligands based on infectious agents that naturally infect microglia. For instance, envelope proteins of human immunodeficiency virus (e.g. HIV-1 YU2, ADA, 89.6, Br20-4, HXB-2 glycoprotein 120) which primarily infect microglia in the CNS. For each identified polypeptide, the library pool consists of oligonucleotides encoding AA 1-14, AA 2-15, AA 3-16, and so on. Oligonucleotides are designed with flanking sequences encoding 5′ and 3′ cap overlap (FIG. 2). Approximately 250 ligands were identified (Table 2). The total number of variants in this library is currently estimated at 130,000.

[0134] Barcode generation. Barcodes are generated and inserted as 20 base pair oligonucleotides flanked by a short domain with homology at 5′ and 3′ ends (FIG. 2). Moreover, all barcode oligos are also contained a LoxPTZ17 sequence in the 5 end for CRE recombination. In order to identify the barcode, barcode sequences are based on a cycled (repeated 5 times) V-H-D-B IUPAC ambiguity code in order to allow for maximum variability while avoiding the formation of longer homopolymers.

[0135] Viral genome generation. The final genome is generated by Gibson assembly of the 4 components (linearized shuttle vector, microglial targeting sequence, sequence containing C-terminal portion of cap and recombinant AAV genome, and barcode fragment; FIG. 2) in order to ensure a 1:1:1:1 (genome: ML: barcode) ratio. The final ligation product represents a ready-to-package genome (FIG. 2—Steps 1, 4).

[0136] Generation of barcode database using paired-end Illumina sequencing. Standard Illumina short-read NGS sequencing does not allow for read lengths that encompass both the barcode and the inserted microglial fragment. In order to prevent this ambiguity, a replica of the original library is utilized. To enable paired-end Illumina sequencing of the library, the plasmid is treated with CRE-recombinase to bring inserted peptide sequence and barcode closer together (FIG. 2—Step 2). In order to prevent recombination between fragments and barcodes, sequencing PCR steps are performed using emulsion PCR. More than 20 million reads are performed to ensure that each variant is sequenced multiple times, ensuring that there is no ambiguity (i.e. the microglial targeting sequence is unequivocally paired with the barcode) with a fidelity approaching 100%. This sequence information is utilized to generate a database where each library genome is identified with one microglial ligand and one barcode.

[0137] Viral generation. A key component of viral production during library generation is to ensure that each production cell (i.e. HEK 293 cell) contains only one version of the cap gene, thus allowing the conclusion that the infectivity of a specific capsid is related to a specific genome. Thus, the stoichiometry is different from that of “standard” AAV production. Nevertheless, this methodology still allows for generation of high titer vector preparation (e.g. see FIG. 1 where this packaging method was utilized to isolate capsid variants). Moreover, the separation of the cap gene (FIG. 2—Step 4) from the recombinant genome ensures that released virions cannot cross-infect cells during production. General vector production is performed as described elsewhere. However, given that the canonical receptor binding site is disrupted, column chromatography is performed.

[0138] Pilot injections. Viral libraries stemming from the 2 pools of ligand oligonucleotides were unilaterally injected into the striatum (n=3 mice/library) in order to ensure that there is not an overt inflammatory response to the ligands themselves. These animals are analyzed for Iba1 and GFAP immunoreactivity. Comparisons are made between AAV-injected and vehicle-injected hemispheres.

[0139] Stereotaxic injections. Vectors (library; n=8 mice (male/female) are injected in to the striatum using standard stereotaxic delivery. The use of a low flow rate (0.5 μl/min, 2 μl total) together with mannitol allows for almost complete transduction of the striatum. This target was chosen because of the ease of which this tissue can be dissected.

[0140] Single nuclei isolation is performed using 10× Genomics Chromium scRNA platform. To balance specificity and sensitivity with detection and throughput, ˜7000 nuclei is loaded onto the Chromium instrument in order to recover ˜4000 nuclei with a low 3.1% doublet rate. This process is repeated to achieve a total of ˜20000 nuclei recovered. Power analysis is conducted using 1000 cells to result in 95% power to detect significant differential expression between brain cell types at a false discovery rate of 10%. Finally, this depth allows the identification of inefficient capsids (i.e. capsids that may be present in off-target cells at extremely low numbers due to a general inefficiency of infection).

[0141] The feasibility of this approach was determined in preliminary studies: In order to determine the ability to 1) Distinguish cell types and 2) Identify rare transduction events, a single striatum was injected with a very low titer of AAV2-CMV-GFP (2 μl of 1×1011 vector genomes/ml). Three days after injection, at a time of very low transgene expression, nuclei were harvested and processed for RNAseq. Using t-Distributed Stochastic Neighbor Embedding (t-SNE), a dimensionality reduction method, both identification of various cell-types in the brain (including microglia which represented roughly 10% of total population), as well as detection of AAV transcripts, were possible (FIG. 3).

[0142] However, in the current approach, to ensure capture and enrichment of the viral capsid specific mRNAs, a AAV viral capsid first strand reverse transcriptase primer is doped into the 10× single master mix, based on a similar protocol. To accommodate the inherent 3′ bias of the 10× Chromium system, the primer is designed to the 5′ of the barcode region, and within 100 bp of the polyA tail (FIG. 1). After generation, indexed and pooled single cell libraries is sequenced on an Illumina NovaSeq instrument using a S1 flow cell to a depth of ˜120K reads/cell to provide sufficient information to both determine cell type and to capture low expressing AAV viral capsid barcodes.

[0143] Bioinformatics. Once split into barcoded consensus reads, the corresponding microglial ligand sequence is identified using a custom developed workflow incorporating the Frame-Pro, BLAST and HMMER algorithms. The 10×single-cell RNA-sequencing data is processed using Cell Ranger 2.0.2 with a custom built reference. The custom reference consists of the mm10 mouse reference genome plus all unique viral genomes being injected. These viral ligands and their unique barcodes are annotated as genes. Ligand expression can then be directly identified using the standard 10× workflow as previously described. Following the 10× workflow, the cell specific transcriptional profile is used for dimensionality reduction to cluster cell types and qualitatively associate viral ligands to the specific cell types they infect. Moreover, identification of cell types is facilitated with the use of the newly developed Fast Batch Alignment (batch balanced k nearest neighbours-BBKNN). This allows the ability to independently query large-scale mouse scRNA seq data sets, as well as to merge the data from several animals in our approach. Once completed, a database of the matched microglial ligand, barcode, cell specific transcriptional profile, and corresponding cell type is developed.

[0144] Importantly, molecular evolution approaches often require multiple rounds of injection, consisting of viral genome isolation, further diversification, and generation of downstream libraries. The approach described herein is not dependent on the isolation of viral genomes, and multiple viral genomes within the same cells do not pose a challenge. Rather, the ability to identify what capsid genes are associated with microglia per se is possible.

### Validation

[0145] The top six candidates identified using the methodology outlined above are packaged and tested in individual animals (male and female mice, n=5 mice×6 vectors×2 sexes=60 mice) in order to ensure the precision and fidelity of the selected capsids. In this phase of experimentation, relatively high (>10¹³ vector genomes (vg)/ml) titers of AAV is used in order to ensure that lack of non-microglial transduction is not due to dose. Validation consists of 1) Quantitative measurements of transgene (near-infrared densitometry of GFP reporter75), and 2) Qualitative dual label ISH against a non-transcribed portion of the viral genome paired with IHC against microglial markers or neuronal markers (FIG. 4) to ensure fidelity of transduction. 3) Stereology of Iba1+ striatal cells is performed to ensure that there is no microglial toxicity as a result of the vector injection, and near-infrared densitometry of Iba1 and GFAP is performed to confirm the absence of neuroinflammation (normalized against the contralateral hemisphere). 4) Stereology of GFP+microglia. If there is any concern that AAV genomes are present in non-microglial cells, additional animals are generated, and cells are sorted using flow cytometry. Vector genomes thereafter are measured in all different cell populations using our standard digital-droplet PCR bio-distribution protocol.

### AAV Mediated Modulation of PRC2 Activity in Microglia and the Intrinsic Excitability of Local Neurons.

[0146] PRC2 is a protein complex with histone methyltransferase activity, and the activity of this complex is crucial for the epigenetic silencing of chromatin. PRC2 in the brain has been associated with cellular differentiation during development. However, this protein has also been ascribed a role in the mature CNS. For instance, in neurons deactivation of this complex can result in drastic changes in dendrite distribution and even neurodegeneration. More importantly, activity of this complex within microglia is associated with region-specific differences in the activity of microglia. As discussed above, activity of PRC2 in striatal microglia facilitates the maintenance of a homeostatic state, whereas disruption of the PRC complex (via removal of the component embryonic ectoderm development protein (EED)), alters the microglial epigenetic and transcriptional profile, and ultimately their function.

[0147] Prior studies have relied upon transgenic mice to specifically modulate microglial transgene expression. However, there are several caveats with this approach. Given the limitations for regions specific control of gene manipulations using the CX3CR1CreER transgenic mouse approach, in the above study, ablation of EED in microglia was performed in the entire brain. Therefore, it is difficult to unequivocally determine if the observed morphological changes in spine density or behavior are caused by changes in local microglia, or if microglial changes in other brain regions affect function or signaling of local afferents, significantly contributing to the phenotype. For instance, changes in cortical neuron firing may have profound effects on MSN morphology and activity. To that end, and as a first validation of the biological utility of the microglial-specific AAV identified herein above (Table 3), the viral vector correlate of this earlier study are performed. However, the analysis is expanded to 1) Include region-specific manipulations, and 2) Perform intracellular electrophysiological recordings to determine the changes in both local and distal neuronal properties as a result of the local changes in microglia. A CRISPR-based approach is used to knockout EED. (see FIG. 5 for feasibility regarding the CRISPR approach). The viral cassette also contains mCherry as a marker of transduction.

[0148] This experimentation is performed in transgenic mice where Thy1-mediated CRE expression drives neuronal-specific YFP expression as a means to label neurons and spines (R26R-EYFP mice crossed with B6.Cg-Tg(Syn1-cre)671Jxm/J mice; both are readily available from The Jackson Laboratory). The reason for this cross is multifold: 1) It demonstrates one advantage of utilizing a microglial-specific AAV as opposed to the CX3CR1CreER mouse; as discussed above, it is difficult to combine two or more distinct CRE-dependent cell-type specific tools. However, in the instant approach, it is possible to manipulate 2 distinct cell populations with no chance of overlap. 2) This approach allows the identification and distinguishes transduced microglia that are in close apposition to spines (e.g. “gliapses”). 3) This approach provides a means to specifically label and quantify dendrites and spines.

[0149] Approach. CRISPR/Cas has become an immensely popular tool for performing manipulations of gene expression in vitro and in vivo. To that end, an AAV-based cassette was developed to do this type of manipulation in vivo in the CNS. Importantly, given that template-directed editing per se is rather limited in post-mitotic cells, the focus is on the creation of premature stop-codons as an alternative proof-of principle approach. The system was validated by targeting the protein tyrosine hydroxylase (TH). Guide RNAs (gRNAs) were developed to induce insertion-deletions (INDEL) at the 5′ end of the gene in order to facilitate the generation of a null-transcript. As is shown in FIG. 5, this approach is very efficient, leading to the homozygous deletion of TH in a majority of neurons in the targeted area. Here, using the same workflow, gRNAs against the EED subunit of the PRC2 complex is generated. gRNA candidates are tested and validated in mouse NIH/3T3 cells using a mutation detection assay, and the candidate with the highest efficiency of cleavage is cloned into the AAV-CRISPR genome developed by the inventors and packaged into the capsid selected above. A non-sense gRNA expressing cassette is utilized as control.

[0150] Validation of the microglial tool: emulation of studies from CX3CR1 mice. Animals receive unilateral stereotaxic injections into either the striatum (2 μl, 0.5 μl/min) or the M1 motor cortex (0.5 μl, 0.25 μl/min100) (n=12 mice (male+female)×2 injection sites×2 vectors×2 outcome measures=96 mice). Four weeks following the vector delivery, animals undergo motor testing (accelerating rotarod and open field testing at both sites). Then, electrophysiological recordings (RFU) and quantitative post-mortem assessment (MSU) are performed.

[0151] Rotarod procedure. An accelerating rotarod paradigm (0-100 rpm over 3 minutes) is used. The time latency and speed at the time of fall are recorded.

[0152] Open field testing. Locomotive behavior (total ambulatory distance) is measured using automated capture over 10 minutes.

[0153] Dendritic Spine Analysis. Striatal and cortical sections are evaluated for changes in spine density and morphology. YFP labeled neurons to be measured is chosen based on the proximity to transduced microglia. Cortical pyramidal dendrites and spines are counted using Neurolucida software. For each animal 20 neurons from each of 2 sections are sampled. Sampling this number of neurons has previously been shown to be sufficient to detect significant differences in spine density in work performed by the inventors involving dyskinetic animals (FIG. 6). For each neuron the dendritic arbors are reconstructed, one dendrite is randomly chosen from each neuron, and the number and phenotype (thin, mushroom, or bifurcated) of spines are quantified in the proximal portion (˜50-90 μm from the cell body) and the distal portion (˜130-170 μm from the cell body). The data is expressed as spines/10 μm.

[0154] In vivo electrophysiological measurement of neuronal excitability. In vivo extracellular recordings in motor cortex and striatum are used to examine potential changes induced by microglia manipulations in the balance of excitatory and inhibitory transmission. Recordings are made using a NeuroData amplifier. Glass electrodes are pulled using a Narishige (PE-21) electrode puller and filled with: 2 M NaCl (extracellular, impedance: 15-25 MΩ) and 2% neurobiotin for juxtacellular labelling. Electrode potentials are digitized, stored, and analyzed using commercial (Axon) software applications. Concentric bipolar stimulating electrodes (NE100X50) are implanted into the motor cortex ipsilateral to the striatal recording electrode. Spontaneous, afferent-evoked, and antidromic spike activity is measured in the cortex and striatum (see FIG. 7) and compared across the different experimental conditions described above. Based on recent studies by the inventors, it was estimated that 10-12 mice/group are needed to collect 10-15 corticostriatal, striatonigral and striatopallidal neurons. Both males and females were used in the studies and no sex differences were discovered with regard to evoked activity and neuronal firing in WT mice. At the end of the recording session, all neurons are juxtacellularly-labeled and neuronal subpopulations are identified using neurobiotin and IHC double labeling.

[0155] Quantitation of knockdown. A quantitative dual ISH/IHC method was previously developed by the inventors, whereby mRNA levels can be quantified in phenotypically distinct cells. The contralateral hemisphere is utilized as a control. Finally, all animals are subject to validation of transduction (i.e. mCherry expression).

[0156] It is expected that suppression of microglia function results in a decrease in dendritic complexity in both striatonigral and striatopallidal projection neurons, as well as in cortical pyramidal neurons. As a result, it is expected that knockout of EED and subsequent disruption of the PRC2 complex induces abnormal membrane activity and hyperexcitability in corticostriatal and MSNs as a result of loss of spine density and membrane surface area, an effect which makes these cells more electrotonically compact.

### Example 3. Impact of Species on Efficacy of Microglial Specific Vector Transduction

[0157] The top 4 capsids identified in Example 2 are tested in St. Kitts Green Monkeys (Chlorocebus sabaeus). Due to the lack of striatal decussations, it is possible to treat each hemisphere as an independent sample. Each virus is injected into 3 hemispheres (n=3 striata/capsid), thus a total of 6 monkeys are utilized. Subjects receive bilateral injections of rAAV expressing GFP targeted to the putamen. As in the rodent validation studies described above, relatively high titers are utilized to achieve maximum transduction. Importantly, during the same surgical session, each animal also receives an injection of the original library targeted to the cerebellum. This structure is removed from the caudate/putamen, and thus does not influence the outcome of the primary objective of this experiment. Nevertheless, this allows the maximal use of each monkey, and utilization of the cerebellar tissue for single nuclei RNAseq as explained below.

[0158] Quantitative postmortem analyses. Tissue is collected at 1 month post-treatment to assess transduction. At euthanasia, subjects are perfused with physiological saline, brains removed, tissue punches collected from caudate nucleus, putamen, the cerebellum is removed, and the remaining tissue immersion fixed in 4% paraformaldehyde. One series of sections is subject to dual ISH/IHC as described above, to assess fidelity of microglial transduction (FIG. 4). Iba1+ immunoreactivity is also measured to identify any inflammation as a result of the vector delivery. Tissue punches are utilized to assess transgene expression using both western blotting and ddPCR. One series is utilized for unbiased stereological estimation of GFP+ cells. Inflammation is assessed using near infrared densitometry of Iba1 and GFAP, and microglial toxicity is assessed using stereology of Iba+ cells. Remaining sections are used as needed. Fresh tissue punches from the caudate/putamen are archived in case cell sorting is needed in order to unequivocally validate fidelity of transduction.

[0159] Tissue injected with the viral library and collected from NHPs as described below is used to generate a scRNA seq library as described in Example 1. RNAseq data are collected and processed as described above. Briefly, ˜7000 nuclei are isolated from dissected cerebellar tissue and loaded onto the 10× Genomics Chromium instrument, and indexed and pooled single cell libraries are sequenced on an Illumina NovaSeq instrument (again multiple runs are performed to sequence a sufficient number of microglia). Sequence data are analyzed in the context of the annotated African green transcriptome and the EMBL-EBI atlas, where the bioinformatics approach is exactly as outlined above.

### Example 4. AAV2-GFP Subpial Injection

[0160] Sprague Dawley rats were injected by subpial injection with ˜1×10¹³ gc/ml of a GFP-expressing rAAV2 having improved neuronal tropism to neurons. One month later the spinal cord was harvested (FIG. 8) and assessed for transduction. Significant transgene (green) expression can be seen throughout thoracic and lumbar sections of the spinal cord (FIGS. 9 to 14). No significant GFP expression can be observed in negative control (spinal cords injected with a lower concentration of the vector). Robust retrograde transduction (i.e. uptake of virus via upper motor neurons and expression of transgene in the brain) can be seen in motor cortex (FIG. 15). Results further show that this virus behaves better in the 1) aged, and 2) deceased nervous system, than common serotypes

The application's sequence listing, which the Patent Office published only in electronic form, follows.

SEQUENCE LISTING (183 sequences)

SEQ ID NO: 1 - protein, 735 aa, adeno-associated virus 2 [sequence omitted]

SEQ ID NO: 2 - protein, 296 aa, Borrelia burgdorferi
MRLLIGFALALALIGCAQKGAESIGSQKENDLNLEDSSKKSHQNAKQDLPAVTEDSVSLFNGNKIFVSKEKNSSGKYDLRATIDQVELKGTSDKNNGSGTLEGSKPDKSKVKLTVSADLNTVTLEAFDASNQKISSKVTKKQGSITEETLKANKLDSKKLTRSNGTTLEYSQITDADNATKAVETLKNSIKLEGSLVGGKTTVEIKEGTVTLKREIEKDGKVKVFLNDTAGSNKKTGKWEDSTSTLTISADSKKTKDLVFLTDGTITVQQYNTAGTSLEGSASEIKNLSELKNALK

SEQ ID NO: 3 - protein, 471 aa, Streptococcus pneumoniae
MANKAVNDFILAMNYDKKKLLTHQGESIENRFIKEGNQLPDEFVVIERKKRSLSTNTSDISVTATNDSRLYPGALLVVDETLLENNPTLLAVDRAPMTYSIDLPGLASSDSFLQVEDPSNSSVRGAVNDLLAKWHQDYGQVNNVPARMQYEKITAHSMEQLKVKFGSDFEKTGNSLDIDFNSVHSGEKQIQIVNFKQIYYTVSVDAVKNPGDVFQDTVTVEDLKQRGISAERPLVYISSVAYGRQVYLKLETTSKSDEVEAAFEALIKGVKVAPQTEWKQILDNTEVKAVILGGDPSSGARVVTGKVDMVEDLIQEGSRFTADHPGLPISYTTSFLRDNVVATFQNSTDYVETKVTAYRNGDLLLDHSGAYVAQYYITWDELSYDHQGKEVLTPKAWDRNGQDLTAHFTTSIPLKGNVRNLSVKIRECTGLAWEWWRTVYEKTDLPLVRKRTISIWGTTLYPQVEDKVEND

SEQ ID NO: 4 - protein, 675 aa, Mus musculus
MRVLSARFRVLLACLALVIPVSETNFLSKERASQVLVRKRRANTLFEETMKGNLERECIEELCNKEEAREVFENNPETDYFYPKYLGCLGAFRVGSFHAARQSANAYPDLRSCVKAISDQCDPIPCNEDGYLACQDGQAAFTCFCKPGWQGDRCQYDVNECKDPSNVNGGCSQICDNTPGSYHCSCKRGFAMLPNKKDCKDLDECALKPSVCGTAVCKNIPGDFECECPDGYRYDPSSKSCKDVDECSENMCAQLCVNFPGGYSCYCDGKKGFKLAQDQKSCEGIPVCLSLDLDKNYELLYLAEQFAGVVLYLKFRLPDITRFSAEFDFRTYDSEGIILYAESLDHSNWLLIALRDGKIEVQFKNEFSTQITTGGNVINNGIWNMVSVEELDDSVSIKIAKEAVMNINKLGSLFKPTDGFLDTKIYFAGLPRKVESALIKPINPRLDGCIRGWNLMKQGALGAKEIIEGKQNKHCFLNVEKGSYYPGSGIAQFSIDYNNVTNAEGWQMNVTLNIRPSTGTGVMLALVSGGTVPFALSLVDSRSGTSQDIVVFVENSVVARLEAVSLCSDQQSQLKCNVNRNGLELWTPLRKDVIYSKDLQRQLAVLDKAMKRTVATYLGGIPDISFSATPVNAFYSGCMEVNINGVQLDLDEAISKHKDIRAHSCPSVRKIQKNF

SEQ ID NO: 5 - protein, 674 aa, Mus musculus
MPPPPGPAAALGTALLLLLLASESSHTVLLRAREAAQFLRPRQRRAYQVFEEAKQGHLERECVEEVCSKEEAREVFENDPETEYFYPRYQECMRKYGRPEEKNPDFAKCVQNLPDQCTPNPCDKKGTHICQDLMGNFFCVCTDGWGGRLCDKDVNECVQKNGGCSQVCHNKPGSFQCACHSGFSLASDGQTCQDIDECTDSDTCGDARCKNLPGSYSCLCDEGYTYSSKEKTCQDVDECQQDRCEQTCVNSPGSYTCHCDGRGGLKLSPDMDTCEDILPCVPFSMAKSVKSLYLGRMFSGTPVIRLRFKRLQPTRLLAEFDFRTFDPEGVLFFAGGRSDSTWIVLGLRAGRLELQLRYNGVGRITSSGPTINHGMWQTISVEELERNLVIKVNKDAVMKIAVAGELFQLERGLYHLNLTVGGIPFKESELVQPINPRLDGCMRSWNWLNGEDSAIQETVKANTKMQCFSVTERGSFFPGNGFATYRLNYTRTSLDVGTETTWEVKVVARIRPATDTGVLLALVGDDDVVPISVALVDYHSTKKLKKQLVVLAVEDVALALMEIKVCDSQEHTVTVSLREGEATLEVDGTKGQSEVSTAQLQERLDTLKTHLQGSVHTYVGGLPEVSVISAPVTAFYRGCMTLEVNGKILDLDTASYKHSDITSHSCPPVEHATP

SEQ ID NO: 6 - protein, 172 aa, Mus musculus
MQFQRDVPSLWLWRSLSLLLLLGLGFSQTPSYRDAVLRAVDDFNQQSLDTNLYRLLDLDPEPQGDEDPDTPKSVRFRVKETVCGKAERQLPEQCAFKEQGVVKQCMGAVTLNPAADSFDISCNEPGAQPFRFKKISRLAGLLRKGGEKIGEKLKKIGQKIKNFFQKLVPQPE

SEQ ID NO: 7 - protein, 175 aa, Mus musculus
MTMCSGARLALLVYGIIMHSSVSCSPAAGLSFPGIRPEDEAYDQDGNPLQDFYDWDPPGVGSPASALRDAYALYYPADRRDVAHEILNEAYRKVLDQLSARKYLQSVVARGAGENLGGSAVDDPAPLTKRHSDGIFTDSYSRYRKQMAVKKYLAAVLGKRYKQRVKNKGRRIAYL

SEQ ID NO: 8 - protein, 327 aa, Mus musculus
MGLPRRLLLLLLLATTCVPASQGLQCMQCESNQSCLVEECALGQDLCRTTVLREWQDDRELEVVTRGCAHSEKTNRTMSYRMGSMIISLTETVCATNLCNRPRPGARGRAFPQGRYLECASCTSLDQSCERGREQSLQCRYPTEHCIEVVTLQSTERSLKDEDYTRGCGSLPGCPGTAGFHSNQTFHFLKCCNYTHCNGGPVLDLQSFPPNGFQCYSCEGNNTLGCSSEEASLINCRGPMNQCLVATGLDVLGNRSYTVRGCATASWCQGSHVADSFPTHLNVSVSCCHGSGCNSPTGGAPRPGPAQLSLIASLLLTLGLWGVLLWT

SEQ ID NO: 9 - protein, 254 aa, Mus musculus
MANLGYWLLALFVTMWTDVGLCKKRPKPGGWNTGGSRYPGQGSPGGNRYPPQGGTWGQPHGGGWGQPHGGSWGQPHGGSWGQPHGGGWGQGGGTHNQWNKPSKPKTNLKHVAGAAAAGAVVGGLGGYMLGSAMSRPMIHFGNDWEDRYYRENMYRYPNQVYYRPVDQYSNQNNFVHDCVNITIKQHTVTTTTKGENFTETDVKMMERVVEQMCVTQYQKESQAYYDGRRSSSTVLFSSPPVILLISFLIFLIVG

SEQ ID NO: 10 - protein, 253 aa, Homo sapiens
MANLGCWMLVLFVATWSDLGLCKKRPKPGGWNTGGSRYPGQGSPGGNRYPPQGGGGWGQPHGGGWGQPHGGGWGQPHGGGWGQPHGGGWGQGGGTHSQWNKPSKPKTNMKHMAGAAAAGAVVGGLGGYMLGSAMSRPIIHFGSDYEDRYYRENMHRYPNQVYYRPMDEYSNQNNFVHDCVNITIKQHTVTTTTKGENFTETDVKMMERVVEQMCITQYERESQAYYQRGSSMVLFSSPPVILLISFLIFLIVG

SEQ ID NO: 11 - protein, 346 aa, Mus musculus
MAMVSEFLKQARFLENQEQEYVQAVKSYKGGPGSAVSPYPSFNVSSDVAALHKAIMVKGVDEATIIDILTKRTNAQRQQIKAAYLQENGKPLDEVLRKALTGHLEEVVLAMLKTPAQFDADELRGAMKGLGTDEDTLIEILTTRSNEQIREINRVYREELKRDLAKDITSDTSGDFRKALLALAKGDRCQDLSVNQDLADTDARALYEAGERRKGTDVNVFTTILTSRSFPHLRRVFQNYGKYSQHDMNKALDLELKGDIEKCLTTIVKCATSTPAFFAEKLYEAMKGAGTRHKALIRIMVSRSEIDMNEIKVFYQKKYGISLCQAILDETKGDYEKILVALCGGN

SEQ ID NO: 12 - protein, 1738 aa, Mus musculus
MRLLWGLAWVFSFCASSLQKPRLLLFSPSVVNLGTPLSVGVQLLDAPPGQEVKGSVFLRNPKGGSCSPKKDFKLSSGDDFVLLSLEVPLEDVRSCGLFDLRRAPHIQLVAQSPWLRNTAFKATETQGVNLLFSSRRGHIFVQTDQPIYNPGQRVRYRVFALDQKMRPSTDFLTITVENSHGLRVLKKEIFTSTSIFQDAFTIPDISEPGTWKISARFSDGLESNRSTHFEVKKYVLPNFEVKITPWKPYILMVPSNSDEIQLDIQARYIYGKPVQGVAYTRFALMDEQGKRTFLRGLETQAKLVEGRTHISISKDQFQAALDKINIGVRDLEGLRLYAATAVIESPGGEMEEAELTSWRFVSSAFSLDLSRTKRHLVPGAHFLLQALVQEMSGSEASNVPVKVSATLVSGSDSQVLDIQQSTNGIGQVSISFPIPPTVTELRLLVSAGSLYPAIARLTVQAPPSRGTGFLSIEPLDPRSPSVGDTFILNLQPVGIPAPTFSHYYYMIISRGQIMAMGREPRKTVTSVSVLVDHQLAPSFYFVAYFYHQGHPVANSLLINIQSRDCEGKLQLKVDGAKEYRNADMMKLRIQTDSKALVALGAVDMALYAVGGRSHKPLDMSKVFEVINSYNVGCGPGGGDDALQVFQDAGLAFSDGDRLTQTREDLSCPKEKKSRQKRNVNFQKAVSEKLGQYSSPDAKRCCQDGMTKLPMKRTCEQRAARVPQQACREPFLSCCKFAEDLRRNQTRSQAHLARNNHNMLQEEDLIDEDDILVRTSFPENWLWRVEPVDSSKLLTVWLPDSMTTWEIHGVSLSKSKGLCVAKPTRVRVFRKFHLHLRLPISIRRFEQFELRPVLYNYLNDDVAVSVHVTPVEGLCLAGGGMMAQQVTVPAGSARPVAFSVVPTAAANVPLKVVARGVFDLGDAVSKILQIEKEGAIHREELVYNLDPLNNLGRTLEIPGSSDPNIVPDGDFSSLVRVTASEPLETMGSEGALSPGGVASLLRLPQGCAEQTMIYLAPTLTASNYLDRTEQWSKLSPETKDHAVDLIQKGYMRIQQFRKNDGSFGAWLHRDSSTWLTAFVLKILSLAQEQVGNSPEKLQETASWLLAQQLGDGSFHDPCPVIHRAMQGGLVGSDETVALTAFVVIALHHGLDVFQDDDAKQLKNRVEASITKANSFLGQKASAGLLGAHAAAITAYALTLTKASEDLRNVAHNSLMAMAEETGEHLYWGLVLGSQDKVVLRPTAPRSPTEPVPQAPALWIETTAYALLHLLLREGKGKMADKAASWLTHQGSFHGAFRSTQDTVVTLDALSAYWIASHTTEEKALNVTLSSMGRNGLKTHGLHLNNHQVKGLEEELKFSLGSTISVKVEGNSKGTLKILRTYNVLDMKNTTCQDLQIEVKVTGAVEYAWDANEDYEDYYDMPAADDPSVPLQPVTPLQLFEGRRSRRRREAPKVVEEQESRVQYTVCIWRNGKLGLSGMAIADITLLSGFHALRADLEKLTSLSDRYVSHFETDGPHVLLYFDSVPTTRECVGFGASQEVVVGLVQPSSAVLYDYYSPDHKCSVFYAAPTKSQLLATLCSGDVCQCAEGKCPRLLRSLERRVEDKDGYRMRFACYYPRVEYGFTVKVLREDGRAAFRLFESKITQVLHFRKDTMASIGQTRNFLSRASCRLRLEPNKEYLIMGMDGETSDNKGDPQYLLDSNTWIEEMPSEQMCKSTRHRAACFQLKDFLMEFSSRGCQV

SEQ ID NO: 13 - protein, 260 aa, Mus musculus
MIETYSQPSPRSVATGLPASMKIFMYLLTVFLITQMIGSVLFAVYLHRRLDKVEEEVNLHEDFVFIKKLKRCNKGEGSLSLLNCEEMRRQFEDLVKDITLNKEEKKENSFEMQRGDEDPQIAAHVVSEANSNAASVLQWAKKGYYTMKSNLVMLENGKQLTVKREGLYYVYTQVTFCSNREPSSQRPFIVGLWLKPSSGSERILLKAANTHSSSQLCEQQSVHLGGVFELQAGASVFVNVTEASQVIHRVGFSSFGLLKL

SEQ ID NO: 14 - protein, 155 aa, Mus musculus
MNATHCILALQLFLMAVSGCYCHGTVIESLESLNNYFNSSGIDVEEKSLFLDIWRNWQKDGDMKILQSQIISFYLRLFEVLKDNQAISNNISVIESHLITTFFSNSKAKKDAFMSIAKFEVNNPQVQRQAFNELIRVVHQLLPESSLRKRKRSRC

SEQ ID NO: 15 - protein, 1755 aa, Mus musculus
MHSLFRKRNKGKYSPTVQTRSISNKELSDLIEQLQKNADQVERNIVDTEAKMQSDLARMQEGQLPEHRDAALQNVSDSEKLLYVLEADSAIAKHMKHPQGDMIAEDIRQLKERVTNLRGKHKQMYSLAVKEADPRVNWDTLVDEKLDKLSSQSFGTDLPLVDSQVEQHNIFHNEVKAIGPHLAKDKEQNSELQAKYQKLLTASQARQQHLSSLQDYMQRCTNELYWLDQQAKGRMQYDWSDRNLDYPSRRRQYENFINRNLEAKEERINKLHTEGDQLLTAEHPGRNSIEAHMEAVHAEWKEYLNLLICEESHLKYMEDYHQFHKDMKDAQELLRKVDSDLNQKYSPDFKDRYQIELLLRELDDQEKALDKYEDVVRGLQRRGQQVVPLKYRRETPLKPIPVEALCDFESDQGLISRGYSYTLQKNNGESWELTDSTGKKLAAPAVCFIIPPTDPEALALADSLGSQYRSVRQKATGSKHALQQRHEVLRTENPGDASDLQGRQLLAGLDKVASDLDRQEKAITGILRPPLEQGRAIEDSAERAKGLKNITNELLQIEPEKTQCTAECEAFVQALPASGTAPLLKTRVEDTNQKYERLVWLLEAAQEKVDVANRLENSLQRGRELLASYENRLIQDDTMPESGHVLDRKRQELEAMASELQAHKSLLGEVGKNLQVAKQCSSSLASRFQEHCPDLERQEAEVHKLNQRFNNLSQQVERRAQSLQSARAAYDEYCSGYNRVLQFLAKTPSYEPQETDSLGQMETKLKNQKNLLDELASREQEVQKVYADSQQYQQAVKDYELEAEKLRSLLDLENGRNSHVNKRARLQSPAAKVKEEEAALAAKFTEVNAINRQRLQNLEFALNLLRQQPEAGVTHETLQGGKLSSGMEETWKIKKELEEEIERRQQLENEVKSAQEEIQTLKDQGPQESLVRKEVLKKVPDPALEESFQQLQQTLAEEQHKNQLLQEELGALQLRLQALEQETRDGGQEYVVKEVLRIEPDRAQEDEVLQLREELEALRRQKGAREAEVLLLQQRVAALAAEKSRVQEKVTEREVVKLQNDPQLEAEYRRLQEEHQREGTLREKQEEELSFLQAKLRRLEKERAMAEGKITVKEVLKVEKDAAVEREVNDLTRQYEDEAAKARSGQREKTELLRKIWALEEENAKVVVQEKVREIVRPDPKAESEVANLRLELVEQERKFRGAEEQLKSYQSELEALRNRGPQVEVKEVTKEVIKYTTDPETEQELQRLREEIMDKTRLIERCDLEIYQLKQEIQALKDTKPQVQTREVVQEILQFQEDPQTKKEVESLRIQLSEEQKKQVDLEGERASQEEKIKRKEEELAQQRKERVVRQEVVQYEDEPDLRAEVTAFTNSIDAELRQIDKLHVELRRLQHRRAELERQLEELERERQARRAAELEVQRLQQRLAALEQEEAKTGEKVTHTQKVVLQQDPQQTREHALLRAQLEEERHRRQLLEGELEPLRRKLAALEKAEIKEKVVFSESVQVEKGDTEQEIQRLKKSLEEESQSKRELDSEVTRLEAKLSELEFYNSKSSKELDFLREENHKLQLERQNLQLETRRLQSEIEMAATETRDLKNITTIDSGTHLNSRLWSLEKELDDLKKMSKDKDLEIDELQRRLGSVAVKREQRENHLRRSIVVIDPDTGRELSPEEAHRAGLIDWKMFVKLRSQECDWEEISVKGPNGESSVIHDRKSGKKFSIEDALQSGRLTAAQYDRYVNKDMSIQELAVLVSGQK

SEQ ID NO: 16 - protein, 340 aa, Mycobacterium tuberculosis
MTFFEQVRRLRSAATTLPRRLAIAAMGAVLVYGLVGTFGGPATAGAFSRPGLPVEYLQVPSASMGRDIKVQFQGGGPHAVYLLDGLRAQDDYNGWDINTPAFEEYYQSGLSVIMPVGGQSSFYTDWYQPSQSNGQNYTYKWETFLTREMPAWLQANKGVSPTGNAAVGLSMSGGSALILAAYYPQQFPYAASLSGFLNPSEGWWPTLIGLAMNDSGGYNANSMWGPSSDPAWKRNDPMVQIPRLVANNTRIWVYCGNGTPSDLGGDNIPAKFLEGLTLRTNQTFRDTYAADGGRNGVFNFPPNGTHSWPYWNEQLVAMKADIQHVLNGATPPAAPAAPAA

SEQ ID NO: 17 - protein, 566 aa, Influenza A virus
MKTIIALSYIFCLALGQDLPGNDNSTATLCLGHHAVPNGTLVKTITDDQIEVTNATELVQSSSTGKICNNPHRILDGIDCTLIDALLGDPHCDVFQNETWDLFVERSKAFSNCYPYDVPDYASLRSLVASSGTLEFITEGFTWTGVTQNGGSNACKRGPGSGFFSRLNWLTKSGSTYPVLNVTMPNNDNFDKLYIWGIHHPSTNQEQTSLYVQASGRVTVSTRRSQQTIIPNIGSRPWVRGLSSRISIYWTIVKPGDVLVINSNGNLIAPRGYFKMRTGKSSIMRSDAPIDTCISECITPNGSIPNDKPFQNVNKITYGACPKYVKQNTLKLATGMRNVPEKQTRGLFGAIAGFIENGWEGMIDGWYGFRHQNSEGTGQAADLKSTQAAIDQINGKLNRVIEKTNEKFHQIEKEFSEVEGRIQDLEKYVEDTKIDLWSYNAELLVALENQHTIDLTDSEMNKLFEKTRRQLRENAEEMGNGCFKIYHKCDNACIESIRNGTYDHDVYRDEALNNRFQIKGVELKSGYKDWILWISFAISCFLLCVVLLGFIMWACQRGNIRCNICI

SEQ ID NO: 18 - protein, 3590 aa, Bordetella pertussis
MNTNLYRLVFSHVRGMLVPVSEHCTVGNTFCGRTRGQARSGARATSLSVAPNALAWALMLACTGLPLVTHAQGLVPQGQTQVLQGGNKVPVVNIADPNSGGVSHNKFQQFNVANPGVVFNNGLTDGVSRIGGALTKNPNLTRQASAILAEVTDTSPSRLAGTLEVYGKGADLIIANPNGISVNGLSTLNASNLTLTTGRPSVNGGRIGLDVQQGTVTIERGGVNATGLGYFDVVARLVKLQGAVSSKQGKPLADIAVVAGANRYDHATRRATPIAAGARGAAAGAYAIDGTAAGAMYGKHITLVSSDSGLGVRQLGSLSSPSAITVSSQGEIALGDATVQRGPLSLKGAGVVSAGKLASGGGAVNVAGGGAVKIASASSVGNLAVQGGGKVQATLLNAGGTLLVSGRQAVQLGAASSRQALSVNAGGALKADKLSATRRVDVDGKQAVALGSASSNALSVRAGGALKAGKLSATGRLDVDGKQAVTLGSVASDGALSVSAGGNLRAKQLVSSAQLEVRGQREVALDDASSARGMTVVAAGALAARNLQSKGAIGVQGGEAVSVANANSDAELRVRGRGQVDLHDLSAARGADISGEGRVNIGRARSDSDVKVSAHGALSIDSMTALGAIGVQAGGSVSAKDMRSRGAVTVSGGGAVNLGDVQSDGQVRATSAGAMTVRDVAAAADLALQAGDALQAGFLKSAGAMTVNGRDAVRLDGAHAGGQLRVSSDGQAALGSLAAKGELTVSAARAATVAELKSLDNISVTGGERVSVQSVNSASRVAISAHGALDVGKVSAKSGIGLEGWGAVGADSLGSDGAISVSGRDAVRVDQARSLADISLGAEGGATLGAVEAAGSIDVRGGSTVAANSLHANRDVRVSGKDAVRVTAATSGGGLHVSSGRQLDLGAVQARGALALDGGAGVALQSAKASGTLHVQGGEHLDLGTLAAVGAVDVNGTGDVRVAKLVSDAGADLQAGRSMTLGIVDTTGDLQARAQQKLELGSVKSDGGLQAAAGGALSLAAAEVAGALELSGQGVTVDRASASRARIDSTGSVGIGALKAGAVEAASPRRARRALRQDFFTPGSVVVRAQGNVTVGRGDPHQGVLAQGDIIMDAKGGTLLLRNDALTENGTVTISADSAVLEHSTIESKISQSVLAAKGDKGKPAVSVKVAKKLFLNGTLRAVNDNNETMSGRQIDVVDGRPQITDAVTGEARKDESVVSDAALVADGGPIVVEAGELVSHAGGIGNGRNKENGASVTVRTTGNLVNKGYISAGKQGVLEVGGALTNEFLVGSDGTQRIEAQRIENRGTFQSQAPAGTAGALVVKAAEAIVHDGVMATKGEMQIAGKGGGSPTVTAGAKATTSANKLSVDVASWDNAGSLDIKKGGAQVTVAGRYAEHGEVSIQGDYTVSADAIALAAQVTQRGGAANLTSRHDTRFSNKIRLMGPLQVNAGGAVSNTGNLKVREGVTVTAASFDNETGAEVMAKSATLTTSGAARNAGKMQVKEAATIVAASVSNPGTFTAGKDITVTSRGGFDNEGKMESNKDIVIKTEQFSNGRVLDAKHDLTVTASGQADNRGSLKAGHDFTVQAQRIDNSGTMAAGHDATLKAPHLRNTGQVVAGHDIHIINSAKLENTGRVDARNDIALDVADFTNTGSLYAEHDATLTLAQGTQRDLVVDQDHILPVAEGTLRVKAKSLTTEIETGNPGSLIAEVQENIDNKQAIVVGKDLTLSSAHGNVANEANALLWAAGELTVKAQNITNKRAALIEAGGNARLTAAVALLNKLGRIRAGEDMHLDAPRIENTAKLSGEVQRKGVQDVGGGEHGRWSGIGYVNYWLRAGNGKKAGTIAAPWYGGDLTAEQSLIEVGKDLYLNAGARKDEHRHLLNEGVIQAGGHGHIGGDVDNRSVVRTVSAMEYFKTPLPVSLTALDNRAGLSPATWNFQSTYELLDYLLDQNRYEYIWGLYPTYTEWSVNTLKNLDLGYQAKPAPTAPPMPKAPELDLRGHTLESAEGRKIFGEYKKLQGEYEKAKMAVQAVEAYGEATRRVHDQLGQRYGKALGGMDAETKEVDGIIQEFAADLRTVYAKQADQATIDAETDKVAQRYKSQIDAVRLQAIQPGRVTLAKALSAALGADWRALGHSQLMQRWKDFKAGKRGAEIAFYPKEQTVLAAGAGLTLSNGAIHNGENAAQNRGRPEGLKIGAHSATSVSGSFDALRDVGLEKRLDIDDALAAVLVNPHIFTRIGAAQTSLADGAAGPALARQARQAPETDGMVDARGLGSADALASLASLDAAQGLEVSGRRNAQVADAGLAGPSAVAAPAVGAADVGVEPVTGDQVDQPVVAVGLEQPVATVRVAPPAVALPRPLFETRIKFIDQSKFYGSRYFFEQIGYKPDRAARVAGDNYFDTTLVREQVRRALGGYESRLPVRGVALVAKLMDSAGTVGKALGLKVGVAPTAQQLKQADRDFVWYVDTVIDGQKVLAPRLYLTEATRQGITDQYAGGGALIASGGDVTVNTDGHDVSSVNGLIQGRSVKVDAGKGKVVVADSKGAGGGIEADDEVDVSGRDIGIEGGKLRGKDVRLKADTVKVATSMRYDDKGRLAARGDGALDAQGGQLHIEAKRLETAGATLKGGKVKLDVDDVKLGGVYEAGSSYENKSSTPLGSLFAILSSTTETNQSAHANHYGTRIEAGTLEGKMQNLEIEGGSVDAAHTDLSVARDARFKAAADFAHAEHEKDVRQLSLGAKVGAGGYEAGFSLGSESGLEAHAGRGMTAGAEVKVGYRASHEQSSETEKSYRNANLNFGGGSVEAGNVLDIGGADINRNRYGGAAKGNAGTEEALRMRAKKVESTKYVSEQTSQSSGWSVEVASTASARSSLLTAATRLGDSVAQNVEDGREIRGELMAAQVAAEATQLVTADTAAVALSAGISADFDSSHSRSTSQNTQYLGGNLSIEATEGDATLVGAKFGGGDQVSLKAAKSVNLMAAESTFESYSESHNFHASADANLGANAVQGAVGLGLTAGMGTSHQITNETGKTYAGTSVDAANVSIDAGKDLNLSGSRVRGKHVVLDVEGDINATSKQDERNYNSSGGGWDASAGVAIQNRTLVAPVGSAGFNFNTEHDNSRLTNDGAAGVVASDGLTGHVKGDANLTGATIADLSGKGNLKVDGAVNAQNLKDYRDKDGGSGGLNVGISSTTLAPTVGVAFGRVAGEDYQAEQRATIDVGQTKDPARLQVGGGVKGTLNQDAAQATVVQRNKHWAGGGSEFSVAGKSLKKKNQVRPVETPTPDVVDGPPSRPTTPPASPQPIRATVEVSSPPPVSVATVEVVPRPKVETAQPLPPRPVAAQVVPVTPPKVEVAKVEVVPRPKVETAQPLPPRPVVAEKVTTPAVQPQLAKVETVQPVKPETTKPLPKPLPVAKVTKAPPPVVETAQPLPPVKPQKATPGPVAEVGKATVTTVQVQSAPPKPAPVAKQPAPAPKPKPKPKPKAERPKPGKTTPLSGRHVVQQQVQVLQRQASDINNTKSLPGGKLPKPVTVKLTDENGKPQTYTINRREDLMKLNGKVLSTKTTLGLEQTFRLRVEDIGGKNYRVFYETNK

SEQ ID NO: 19 - protein, 481 aa, Mus musculus
MKAGTGPLLSTLLGLLFLSIQGTGGVNPGVVARITDKGLAYAAKEGLVALQRELYKITLPDFSGDFKIKAVGRGQYEFHSLEIQNCELRGSSLKLLPGQGLSLAISDSSIGVRGKWKVRKSFLKLHGSFDLDVKGVTISVDLLLGMDPSGRPTVSASGCSSRICDLDVHISGNVGWLLNLFHNQIESKLQKVLENKVCEMIQKSVTSDLQPYLQTLPVTAEIDNVLGIDYSLVAAPQAKAQVLDVMFKGEIFNRNHRSPVATPTPTMSLPEDSKQMVYFAISDYAFNIASRVYHQAGYLNFSITDDMLPHDSGIRLNTKAFRPFTPQIYKKYPDMKLELLGTVVSAPILNVSPGNLSLAPQMEIEGFVILPTSAREPVFRLGVVTNVFASLTFNNSKVTGMLHPDKAQVRLIESKVGMFNVNLFQAFLNYYLLNSLYPDVNAELAQGFPLPLPRHIQLHDLDFQIRKDFLYLGANVQYMRV

SEQ ID NO: 20 - protein, 235 aa, Mus musculus
MPWGLAWLYCLGILLDVALGNENLEIWTLTQDKECDLTGYLRGKLQYKNRLQYMKHYFPINYRIAVPYEGVLRVANITRLQKAHVSERELRYLWVLVSLNATESVMDVLLEGHPSWKYLQEVQTLLENVQRSLMDVEIGPHVEAVLSLLSTPGLSLKLVRPKALLDNCFRVMELLYCSCCKQSPILKWQDCELPRLHPHSPGSLMQCTATNVYPLSRQTPTSLPGSPSSSHGSLP

SEQ ID NO: 21 - protein, 552 aa, Mus musculus
MTARGAAGRCPSSTWLGSRLLLVCLLMSRSIAKEVSEHCSHMIGNGHLKVLQQLIDSQMETSCQIAFEFVDQEQLDDPVCYLKKAFFLVQDIIDETMRFKDNTPNANATERLQELSNNLNSCFTKDYEEQNKACVRTFHETPLQLLEKIKNFFNETKNLLEKDWNIFTKNCNNSFAKCSSRDVVTKPDCNCLYPKATPSSDPASASPHQPPAPSMAPLAGLAWDDSQRTEGSSLLPSELPLRIEDPGSAKQRPPRSTCQTLESTEQPNHGDRLTEDSQPHPSAGGPVPGVEDILESSLGTNWVLEEASGEASEGFLTQEAKFSPSTPVGGSIQAETDRPRALSASPFPKSTEDQKPVDITDRPLTEVNPMRPIGQTQNNTPEKTDGTSTLREDHQEPGSPHIATPNPQRVSNSATPVAQLLLPKSHSWGIVLPLGELEGKRSTRDRRSPAELEGGSASEGAARPVARFNSIPLTDTGHVEQHEGSSDPQIPESVFHLLVPGIILVLLTVGGLLFYKWKWRSHRDPQTLDSSVGRPEDSSLTQDEDRQVELPV

SEQ ID NO: 22 - protein, 363 aa, Hepatitis C virus
ETHVTGGSAGHTVSGFVSLLAPGAKQNVQLINTNGSWHLNSTALNCNDSLNTGWLAGLFYHHKFNSSGCPERLASCRPLTDFDQGWGPISYANGSGPDQRPYCWHYPPKPCGIVPAKSVCGPVYCFTPSPVVVGTTDRSGAPTYSWGENDTDVFVLNNTRPPLGNWFGCTWMNSTGFTKVCGAPPCVIGGAGNNTLHCPTDCFRKHPDATYSRCGSGPWITPRCLVDYPYRLWHYPCTINYTIFKIRMYVGGVEHRLEAACNWTRGERCDLEDRDRSELSPLLLTTTQWQVLPCSFTTLPALSTGLIHLHQNIVDVQYLYGVGSSIASWAIKWEYVVLLFLLLADARVCSCLWMMLLISQAEA

SEQ ID NO: 23 - protein, 192 aa, Hepatitis C virus
YQVRNSTGLYHVTNDCPNSSIVYEAADAILHTPGCVPCVREGNASRCWVAMTPTVATRDGKLPATQLRRHIDLLVGSATLCSALYVGDLCGSVFLVGQLFTFSPRRHWTTQGCNCSIYPGHITGHRMAWDMMMNWSPTTALVMAQLLRIPQAILDMIAGAHWGVLAGIAYFSMVGNWAKVLVVLLLFAGVDA

SEQ ID NO: 24 - protein, 999 aa, Mus musculus
MAATVRRQRPRRLLCWALVAVLLADLLALSDTLAVMSVDLGSESMKVAIVKPGVPMEIVLNKESRRKTPVTVTLKENERFLGDSAAGMAIKNPKATLRYFQHLLGKQADNPHVALYRSRFPEHELIVDPQRQTVRFQISPQLQFSPEEVLGMVLNYSRSLAEDFAEQPIKDAVITVPAFFNQAERRAVLQAARMAGLKVLQLINDNTATALSYGVFRRKDINSTAQNVMFYDMGSGSTVCTIVTYQTVKTKEAGMQPQLQIRGVGFDRTLGGLEMELRLREHLAKLFNEQRKGQKAKDVRENPRAMAKLLREANRLKTVLSANADHMAQIEGLMDDVDFKAKVTRVEFEELCADLFDRVPGPVQQALQSAEMSLDQIEQVILVGGATRVPKVQEVLLKAVGKEELGKNINADEAAAMGAVYQAAALSKAFKVKPFVVRDAVIYPILVEFTREVEEEPGLRSLKHNKRVLFSRMGPYPQRKVITFNRYSHDFNFHINYGDLGFLGPEDLRVFGSQNLTTVKLKGVGESFKKYPDYESKGIKAHFNLDESGVLSLDRVESVFETLVEDSPEEESTLTKLGNTISSLFGGGTSSDAKENGTDAVQEEEESPAEGSKDEPAEQGELKEEAEPPAEETSQPPPSEPKGDAAREGEKPDEKESGDKPEAQKPNEKGQAGPEGAAPAPEEDKKPKPARKQKMVEEIGVELAVLDLPDLPEDELARSVQKLEELTLRDLEKQEREKAANSLEAFIFETQDKLYQPEYQEVSTEEQREEISGKLSATSTWLEDEGFGATTVMLKDKLAELRKLCQGLFFRVEERRKWPERLSALDNLLNHSSIFLKGARLIPEMDQVFTEVEMTTLEKVINDTWAWKNATLAEQAKLPATEKPVLLSKDIEAKMMALDREVQYLLNKAKFTKPRPRPKDKNGTRAEPPLNASAGDQEEKVIPPAGQTEEAKPILEPDKEETGTEPADSEPLELGGPGAGPEQEEQSAGQKRPSKNDEL

SEQ ID NO: 25 - protein, 858 aa, Mus musculus
MSVVGLDVGSQSCYIAVARAGGIETIANEFSDRCTPSVISFGSKNRTIGVAAKNQQITHANNTVSSFKRFHGRAFNDPFIQKEKENLSYDLVPMKNGGVGIKVMYMDEEHFFSVEQITAMLLTKLKETAENNLKKPVTDCVISVPSFFTDAERRSVLDAAQIVGLNCLRLMNDMTAVALNYGIYKQDLPNAEEKPRVVVFVDMGHSSFQVSACAFNKGKLKVLGTAFDPFLGGKNFDEKLVEHFCAEFKTKYKLDAKSKIRALLRLHQECEKLKKLMSSNSTDLPLNIECFMNDKDVSGKMNRSQFEELCAELLQKIEVPLHSLMAQTQLKAEDVSAIEIVGGATRIPAVKERIAKFFGKDVSTTLNADEAVARGCALQCAILSPAFKVREFSVTDAVPFPISLVWNHDSEETEGVHEVFSRNHAAPFSKVLTFLRRGPFELEAFYSDPQGVPYPEAKIGRFVVQNVSAQKDGEKSRVKVKVRVNTHGIFTISTASMVEKVPTEEEDGSSLEADMECPNQRPTESSDVDKNIQQDNSEAGTQPQVQTDGQQTSQSPPSPELTSEESKTPDADKANEKKVDQPPEAKKPKIKVVNVELPVEANLVWQLGRDLLNMYIETEGKMIMQDKLEKERNDAKNAVEECVYEFRDKLCGPYEKFICEQEHEKFLRLLTETEDWLYEEGEDQAKQAYIDKLEELMKMGTPVKVRFQEAEERPKVLEELGQRLQHYAKIAADFRGKDEKYNHIDESEMKKVEKSVNEVMEWMNNVMNAQAKRSLDQDPVVRTHEIRAKVKELNNVCEPVVTQPKPKIESPKLERTPNGPNIDKKEDLEGKNNLGAEAPHQNGECHPNEKGSVNMDLD

SEQ ID NO: 26 - protein, 802 aa, Mus musculus
MRVLWVLGLCCVLLTFGFVRADDEVDVDGTVEEDLGKSREGSRTDDEVVQREEEAIQLDGLNASQIRELREKSEKFAFQAEVNRMMKLIINSLYKNKEIFLRELISNASDALDKIRLISLTDENALAGNEELTVKIKCDKEKNLLHVTDTGVGMTREELVKNLGTIAKSGTSEFLNKMTEAQEDGQSTSELIGQFGVGFYSAFLVADKVIVTSKHNNDTQHIWESDSNEFSVIADPRGNTLGRGTTITLVLKEEASDYLELDTIKNLVRKYSQFINFPIYVWSSKTETVEEPLEEDEAAKEEKEESDDEAAVEEEEEEKKPKTKKVEKTVWDWELMNDIKPIWQRPSKEVEEDEYKAFYKSFSKESDDPMAYIHFTAEGEVTFKSILFVPTSAPRGLFDEYGSKKSDYIKLYVRRVFITDDFHDMMPKYLNFVKGVVDSDDLPLNVSRETLQQHKLLKVIRKKLVRKTLDMIKKIADEKYNDTFWKEFGTNIKLGVIEDHSNRTRLAKLLRFQSSHHSTDITSLDQYVERMKEKQDKIYFMAGSSRKEAESSPFVERLLKKGYEVIYLTEPVDEYCIQALPEFDGKRFQNVAKEGVKFDESEKTKESREATEKEFEPLLNWMKDKALKDKIEKAVVSQRLTESPCALVASQYGWSGNMERIMKAQAYQTGKDISTNYYASQKKTFEINPRHPLIRDMLRRIKEDEDDKTVMDLAVVLFETATLRSGYLLPDTKAYGDRIERMLRLSLNIDPEAQVEEEPEEEPEDTSEDAEDSEQDEGEEMDAGTEEEEEETEKESTEKDEL

SEQ ID NO: 27 - protein, 733 aa, Mus musculus
MPEETQTQDQPMEEEEVETFAFQAEIAQLMSLIINTFYSNKEIFLRELISNSSDALDKIRYESLTDPSKLDSGKELHINLIPSKQDRTLTIVDTGIGMTKADLINNLGTIAKSGTKAFMEALQAGADISMIGQFGVGFYSAYLVAEKVTVITKHNDDEQYAWESSAGGSFTVRTDTGEPMGRGTKVILHLKEDQTEYLEERRIKEIVKKHSQFIGYPITLFVEKERDKEVSDDEAEEKEEKEEEKEKEEKESDDKPEIEDVGSDEEEEEKKDGDKKKKKKIKEKYIDQEELNKTKPIWTRNPDDITNEEYGEFYKSLTNDWEEHLAVKHFSVEGQLEFRALLFVPRRAPFDLFENRKKKNNIKLYVRRVFIMDNCEELIPEYLNFIRGVVDSEDLPLNISREMLQQSKILKVIRKNLVKKCLELFTELAEDKENYKKFYEQFSKNIKLGIHEDSQNRKKLSELLRYYTSASGDEMVSLKDYCTRMKENQKHIYFITGETKDQVANSAFVERLRKHGLEVIYMIEPIDEYCVQQLKEFEGKTLVSVTKEGLELPEDEEEKKKQEEKKTKFENLCKIMKDILEKKVEKVVVSNRLVTSPCCIVTSTYGWTANMERIMKAQALRDNSTMGYMAAKKHLEINPDHSIIETLRQKAEADKNDKSVKDLVILLYETALLSSGFSLEDPQTHANRIYRMIKLGLGIDEDDPTVDDTSAAVTEEMPPLEGDDDTSRMEEVD

SEQ ID NO: 28 - protein, 724 aa, Mus musculus
MPEEVHHGEEEVETFAFQAEIAQLMSLIINTFYSNKEIFLRELISNASDALDKIRYESLTDPSKLDSGKELKIDIIPNPQERTLTLVDTGIGMTKADLINNLGTIAKSGTKAFMEALQAGADISMIGQFGVGFYSAYLVAEKVVVITKHNDDEQYAWESSAGGSFTVRADHGEPIGRGTKVILHLKEDQTEYLEERRVKEVVKKHSQFIGYPITLYLEKEREKEISDDEAEEEKGEKEEEDKEDEEKPKIEDVGSDEEDDSGKDKKKKTKKIKEKYIDQEELNKTKPIWTRNPDDITQEEYGEFYKSLTNDWEDHLAVKHFSVEGQLEFRALLFIPRRAPFDLFENKKKKNNIKLYVRRVFIMDSCDELIPEYLNFIRGVVDSEDLPLNISREMLQQSKILKVIRKNIVKKCLELFSELAEDKENYKKFYEAFSKNLKLGIHEDSTNRRRLSELLRYHTSQSGDEMTSLSEYVSRMKETQKSIYYITGESKEQVANSAFVERVRKRGFEVVYMTEPIDEYCVQQLKEFDGKSLVSVTKEGLELPEDEEEKKKMEESKAKFENLCKLMKEILDKKVEKVTISNRLVSSPCCIVTSTYGWTANMERIMKAQALRDNSTMGYMMAKKHLEINPDHPIVETLRQKAEADKNDKAVKDLVVLLFETALLSSGFSLEDPQTHSNRIYRMIKLGLGIDEDEVTAEEPSAAVPDEIPPLEGDEDASRMEEVD

SEQ ID NO: 29 - protein, 642 aa, Mus musculus
MAKNTAIGIDLGTTYSCVGVFQHGKVEIIANDQGNRTTPSYVAFTDTERLIGDAAKNQVALNPQNTVFDAKRLIGRKFGDAVVQSDMKHWPFQVVNDGDKPKVQVNYKGESRSFFPEEISSMVLTKMKEIAEAYLGHPVTNAVITVPAYFNDSQRQATKDAGVIAGLNVLRIINEPTAAAIAYGLDRTGKGERNVLIFDLGGGTFDVSILTIDDGIFEVKATAGDTHLGGEDFDNRLVSHFVEEFKRKHKKDISQNKRAVRRLRTACERAKRTLSSSTQASLEIDSLFEGIDFYTSITRARFEELCSDLFRGTLEPVEKALRDAKMDKAQIHDLVLVGGSTRIPKVQKLLQDFFNGRDLNKSINPDEAVAYGAAVQAAILMGDKSENVQDLLLLDVAPLSLGLETAGGVMTALIKRNSTIPTKQTQTFTTYSDNQPGVLIQVYEGERAMTRDNNLLGRFELSGIPPAPRGVPQIEVTFDIDANGILNVTATDKSTGKANKITITNDKGRLSKEEIERMVQEAERYKAEDEVQRDRVAAKNALESYAFNMKSAVEDEGLKGKLSEADKKKVLDKCQEVISWLDSNTLADKEEFVHKREELERVCSPIISGLYQGAGAPGAGGFGAQAPPKGASGSGPTIEEVD

SEQ ID NO: 30 - protein, 416 aa, Mus musculus
MLLSVPLLLGLLGLAAADPAIYFKEQFLDGDAWTNRWVESKHKSDFGKFVLSSGKFYGDLEKDKGLQTSQDARFYALSAKFEPFSNKGQTLVVQFTVKHEQNIDCGGGYVKLFPSGLDQKDMHGDSEYNIMFGPDICGPGTKKVHVIFNYKGKNVLINKDIRCKDDEFTHLYTLIVRPDNTYEVKIDNSQVESGSLEDDWDFLPPKKIKDPDAAKPEDWDERAKIDDPTDSKPEDWDKPEHIPDPDAKKPEDWDEEMDGEWEPPVIQNPEYKGEWKPRQIDNPDYKGTWIHPEIDNPEYSPDANIYAYDSFAVLGLDLWQVKSGTIFDNFLITNDEAYAEEFGNETWGVTKAAEKQMKDKQDEEQRLKEEEEDKKRKEEEEAEDKEDDDDRDEDEDEEDEKEEDEEESPGQAKDEL

SEQ ID NO: 31 - protein, 326 aa, Mycobacterium tuberculosis
MASKAGLGQTPATTDARRTQKFYRGSPGRPWLIGAVVIPLLIAAIGYGAFERPQSVTGPTGVLPTLTPTSTRGASALSLSLLSISRSGNTVTLIGDFPDEAAKAALMTALNGLLAPGVNVIDQIHVDPVVRSLDFSSAEPVFTASVPIPDFGLKVERDTVTLTGTAPSSEHKDAVKRAATSTWPDMKIVNNIEVTGQAPPGPPASGPCADLQSAINAVTGGPIAFGNDGASLIPADYEILNRVADKLKACPDARVTINGYTDNTGSEGINIPLSAQRAKIVADYLVARGVAGDHIATVGLGSVNPIASNATPEGRAKNRRVEIVVN

SEQ ID NO: 32 - protein, 346 aa, Escherichia coli
MKKTAIAIAVALAGFATVAQAAPKDNTWYTGAKLGWSQYHDTGFINNNGPTHENQLGAGAFGGYQVNPYVGFEMGYDWLGRMPYKGSVENGAYKAQGVQLTAKLGYPITDDLDIYTRLGGMVWRADTKSNVYGKNHDTGVSPVFAGGVEYAITPEIATRLEYQWTNNIGDAHTIGTRPDNGMLSLGVSYRFGQGEAAPVVAPAPAPAPEVQTKHFTLKSDVLFNFNKATLKPEGQAALDQLYSQLSNLDPKDGSVVVLGYTDRIGSDAYNQGLSERRAQSVVDYLISKGIPADKISARGMGESNPVTGNTCDNVKQRAALIDCLAPDRRVEIEVKGIKDVVTQPQA

SEQ ID NO: 33 - protein, 353 aa, Yersinia pestis
MKKTAIALAVALVGFATVAQAAPKDNTWYTGGKLGWSQYQDTGSIINNDGPTHKDQLGAGAFFGYQANQYLGFEMGYDWLGRMPYKGDINNGAFKAQGVQLAAKLSYPVAQDLDVYTRLGGLVWRADAKGSFDGGLDRASGHDTGVSPLVALGAEYAWTKNWATRMEYQWVNNIGDRETVGARPDNGLLSVGVSYRFGQEDAAAPIVAPTPAPAPIVDTKRFTLKSDVLFGFNKANLKPEGQQALDQLYAQLSSIDPKDGSVVVLGFADRIGQPAPNLALSQRRADSVRDYLVSKGIPADKITARGEGQANPVTGNTCDNVKPRAALIECLAPDRRVEIEVKGYKEVVTQPQA

SEQ ID NO: 34 - protein, 420 aa, Human adenovirus type 17
MNTVIRIVLLSLLVTFSQAGFHTINATWWANITLVGPSDIPVTWYDSTGLQFCDGSTVKNPQIRHSCNDQNLTLIHVNKTHERTYMGYNKQSTHKEDYKVTVIPPPPVTVKPQPEPEYVYVNMGENKTLVGPPGIPVSWFNQDGLQFCIGDKVFHPEFNHTCDMQNLTLLFINLTHDGAYLGYNRQGTERTWYEVVVSDGFPKSEEMKVEDHSKETEQKQTGQKQSDHKQGGQKETSQKKTNDKQKPSRRRPSKLKPNTPDTKLITVTSGSNVTLVGPDGKVTWYDDDLKRPCEPGYKLGCKCDNQNLTLINVTKLYEGVYYGTNDRGNSKRYRVKVNTTNSQSVKIQPYTRPTTPDQKHRFELQIDSNQDKIPSTTVAIVVGVIAGFVTLIIIFICYICCRKRPRSYNHMVDPLLSFSY

SEQ ID NO: 35 - protein, 272 aa, Human cytomegalovirus
MLFRYITFHREKVLYLTAACIFGVYISLHDACIPVVGKIGTNVTLNAVDVLPPRDQVRWSYGPGGQGYMLCIFTGTSTTTFNNTRFNFSCLSNYSLLLINVTTQYSTTYRTMTSLDHWLHQRHNHGSRWTLDTCYNLTVNENGTFPTTTTKKPTTTTRTTTTTTQRTTTTRTTTTAKKTTISTTHHKHPSPKKSTTPNSHVEHHVGFEATAAETPLQPSPQHQHLATHALWVLAVVIVIIIIIIFYFRIPQKLWLLWQHDKHGIVLIPQTDL

SEQ ID NO: 36 - protein, 96 aa, Rat cytomegalovirus
MGANCCKRVCCQFHPSASDSVMDATGVPVRLGSEFTVMTDTSDEDDDNFGIDESKRKLLGSVASDAIPKTVPVPVQMSTRSGKKPKGILKKKVRAM

SEQ ID NO: 37 - protein, 264 aa, Mus musculus
MADSFSLNDALAGSGNPNPQGYPGAWGNQPGAGGYPGAAYPGAYPGQAPPGAYPGQAPPGAYPGQAPPSAYPGPTAPGAYPGPTAPGAYPGQPAPGAFPGQPGAPGAYPQCSGGYPAAGPYGVPAGPLTVPYDLPLPGGVMPRMLITIMGTVKPNANRIVLDFRRGNDVAFHFNPRFNENNRRVIVCNTKQDNNWGKEERQSAFPFESGKPFKIQVLVEADHFKVAVNDAHLLQYNHRMKNLREISQLGISGDITLTSANHAMI

SEQ ID NO: 38 - protein, 1210 aa, Mus musculus
MRPSGTARTTLLVLLTALCAAGGALEEKKVCQGTSNRLTQLGTFEDHFLSLQRMYNNCEVVLGNLEITYVQRNYDLSFLKTIQEVAGYVLIALNTVERIPLENLQIIRGNALYENTYALAILSNYGTNRTGLRELPMRNLQEILIGAVRFSNNPILCNMDTIQWRDIVQNVFMSNMSMDLQSHPSSCPKCDPSCPNGSCWGGGEENCQKLTKIICAQQCSHRCRGRSPSDCCHNQCAAGCTGPRESDCLVCQKFQDEATCKDTCPPLMLYNPTTYQMDVNPEGKYSFGATCVKKCPRNYVVTDHGSCVRACGPDYYEVEEDGIRKCKKCDGPCRKVCNGIGIGEFKDTLSINATNIKHFKYCTAISGDLHILPVAFKGDSFTRTPPLDPRELEILKTVKEITGFLLIQAWPDNWTDLHAFENLEIIRGRTKQHGQFSLAVVGLNITSLGLRSLKEISDGDVIISGNRNLCYANTINWKKLFGTPNQKTKIMNNRAEKDCKAVNHVCNPLCSSEGCWGPEPRDCVSCQNVSRGRECVEKCNILEGEPREFVENSECIQCHPECLPQAMNITCTGRGPDNCIQCAHYIDGPHCVKTCPAGIMGENNTLVWKYADANNVCHLCHANCTYGCAGPGLQGCEVWPSGPKIPSIATGIVGGLLFIVVVALGIGLFMRRRHIVRKRTLRRLLQERELVEPLTPSGEAPNQAHLRILKETEFKKIKVLGSGAFGTVYKGLWIPEGEKVKIPVAIKELREATSPKANKEILDEAYVMASVDNPHVCRLLGICLTSTVQLITQLMPYGCLLDYVREHKDNIGSQYLLNWCVQIAKGMNYLEDRRLVHRDLAARNVLVKTPQHVKITDFGLAKLLGAEEKEYHAEGGKVPIKWMALESILHRIYTHQSDVWSYGVTVWELMTFGSKPYDGIPASDISSILEKGERLPQPPICTIDVYMIMVKCWMIDADSRPKFRELILEFSKMARDPQRYLVIQGDERMHLPSPTDSNFYRALMDEEDMEDVVDADEYLIPQQGFFNSPSTSRTPLLSSLSATSNNSTVACINRNGSCRVKEDAFLQRYSSDPTGAVTEDNIDDAFLPVPEYVNQSVPKRPAGSVQNPVYHNQPLHPAPGRDLHYQNPHSNAVGNPEYLNTAQPTCLSSGFNSPALWIQKGSHQMSLDNPDYQQDFFPKETKPNGIFKGPTAENAEYLRVAPPSSEFIGA

SEQ ID NO: 39 - protein, 853 aa, Mus musculus
MAEGNNKEEVIHLNNFPCHRGKEWMAVREGPITISDSSDEEGIPMLVTPATEQQEDDLDDDVILTEDDSEDEYGGFLDLESGKKEGEAKPGPSSKQTADDIVNPRLEQKVIILGENGLLFPESEPLEVQNQSSEDSETELLSNPGEPAASVDDQLIGEEYWLDHPYFQAPNPQPQERTNQVVPQERHSESEMGPMFFRHDFPEPAFPRPEPQQEGIPGPASPQPAHPLGELEDQQLAIDEDPGPAFPLSGPQEANLANMWEQEAAEVDQDLIPLLVKETEARFPDVASGYVEEIIHLKNYYDLNVLCNFLLENPDYPKREDRLIIHPSSSLLASQDDAKLPKIDFFDYSKLTPLDQRCFIQAADLLMADFKMLSSQDIKWALHELKGHYAITRKAFSDAIKKWQELSPETSGKRKKRKEMNQYSFIDFKFEQGNIKIEKRMFFLENKRRHCRYYDHQALLPAVKQEQEFYEQKIKEMAEHEDFLLALQMNEEQYQKDGQLIECRCCYGEFPFEELTQCADAHLFCKECLIRYAQEAVFGSGKSELSCMEGSCTCSFPTSELEKVLPQTILYKYYERKAEEEVAAAYADELVRCPSCSFPALLDSDVKRFSCPNPRCRKETCRKCQGLWKEHNGLTCEELAEKDDIKYRTSIEEKMTAARIRKCHKCGTGLIKSEGCNRMSCRCGAQMCYLCRVSINGYDHFCQHPRSPGAPCQECSRCSLWTDPTEDDEKLIEEIQKEAEEEQKRKNGENTFKRIGPPLEKPAEKVQRVEALPRPVPQNLHPQMPPYAFVHPPFPLPPVRPVFNNFPINMGPVPAPYVPPLPNVRVNYDFGHMHVPLEHNLPMHFGPQPRHRF

SEQ ID NO: 40 - protein, 366 aa, Mus musculus
MERVLGLLLLLLVHASPAPPEPCELDEESCSCNFSDPKPDWSSAFNCLGAADVELYGGGRSLEYLLKRVDTEADLGQFTDIIKSLSLKRLTVRAARIPSRILFGALRVLGISGLQELTLENLEVTGTAPPPLLEATGPDLNILNLRNVSWATRDAWLAELQQWLKPGLKVLSIAQAHSLNFSCEQVRVFPALSTLDLSDNPELGERGLISALCPLKFPTLQVLALRNAGMETPSGVCSALAAARVQLQGLDLSHNSLRDAAGAPSCDWPSQLNSLNLSFTGLKQVPKGLPAKLSVLDLSYNRLDRNPSPDELPQVGNLSLKGNPFLDSESHSEKFNSGVVTAGAPSSQAVALSGTLALLLGDRLFV

SEQ ID NO: 41 - protein, 296 aa, Mus musculus
MSAGDPRVGSGSLDSFMFSIPLVALNVGVRRRLSLFLNPRTPVAADWTLLAEEMGFEYLEIRELETRPDPTRSLLDAWQGRSGASVGRLLELLALLDREDILKELKSRIEEDCQKYLGKQQNQESEKPLQVARVESSVPQTKELGGITTLDDPLGQTPELFDAFICYCPNDIEFVQEMIRQLEQTDYRLKLCVSDRDVLPGTCVWSIASELIEKRCRRMVVVVSDDYLQSKECDFQTKFALSLSPGVQQKRLIPIKYKAMKKDFPSILRFITICDYTNPCTKSWFWTRLAKALSLP

SEQ ID NO: 42 - protein, 160 aa, Mus musculus
MLPFILFSTLLSPILTESEKQQWFCNSSDAIISYSYCDHLKFPISISSEPCIRLRGTNGFVHVEFIPRGNLKYLYFNLFISVNSIELPKRKEVLCHGHDDDYSFCRALKGETVNTSIPFSFEGILFPKGHYRCVAEAIAGDTEEKLFCLNFTIIHRRDVN

SEQ ID NO: 43 - protein, 335 aa, Mus musculus
MCPQKLTISWFAIVLLVSPLMAMWELEKDVYVVEVDWTPDAPGETVNLTCDTPEEDDITWTSDQRHGVIGSGKTLTITVKEFLDAGQYTCHKGGETLSHSHLLLHKKENGIWSTEILKNFKNKTFLKCEAPNYSGRFTCSWLVQRNMDLKFNIKSSSSSPDSRAVTCGMASLSAEKVTLDQRDYEKYSVSCQEDVTCPTAEETLPIELALEARQQNKYENYSTSFFIRDIIKPDPPKNLQMKPLKNSQVEVSWEYPDSWSTPHSYFSLKFFVRIQRKKEKMKETEEGCNQKGAFLVEKTSTEVQCKGGNVCVQAQDRYYNSSCSKWACVPCRVRS

SEQ ID NO: 44 - protein, 215 aa, Mus musculus
MCQSRYLLFLATLALLNHLSLARVIPVSGPARCLSQSRNLLKTTDDMVKTAREKLKHYSCTAEDIDHEDITRDQTSTLKTCLPLELHKNESCLATRETSSTTRGSCLPPQKTSLMMTLCLGSIYEDLKMYQTEFQAINAALQNHNHQQIILDKGMLVAIDELMQSLNHNGETLRQKPPVGEADPYRVKMKLCILLHAFSTRVVTINRVMGYLSSA

SEQ ID NO: 45 - protein, 211 aa, Mus musculus
MKFLSARDFHPVAFLGLMLVTTTAFPTSQVRRGDFTEDTTPNRPVYTTSQVGGLITHVLWEIVEMRKELCNGNSDCMNNDDALAENNLKLPEIQRNDGCYQTGYNQEICLLKISSGLLEYHSYLEYMKNNLKDNKKDKARVLQRDTETLIHIFNQEVKDLHKIVLPTPISNALLTDKLESQKEWLRTKTIQFILKSLEEFLKVTLRSTRQT

SEQ ID NO: 46 - protein, 269 aa, Mus musculus
MATVPELNCEMPPFDSDENDLFFEVDGPQKMKGCFQTFDLGCPDESIQLQISQQHINKSFRQAVSLIVAVEKLWQLPVSFPWTFQDEDMSTFFSFIFEEEPILCDSWDDDDNLLVCDVPIRQLHYRLRDEQQKSLVLSDPYELKALHLNGQNINQQVIFSMSFVQGEPSNDKIPVALGLKGKNLYLSCVMKDGTPTLQLESVDPKQYPKKKMEKRFVFNKIEVKSKVEFESAEFPNWYISTSQAEHKPVFLGNNSGQDIIDFTMESVSS

SEQ ID NO: 47 - protein, 270 aa, Mus musculus
MAKVPDLFEDLKNCYSENEDYSSAIDHLSLNQKSFYDASYGSLHETCTDQFVSLRTSETSKMSNFTFKESRVTVSATSSNGKILKKRRLSFSETFTEDDLQSITHDLEETIQPRSAPYTYQSDLRYKLMKLVRQKFVMNDSLNQTIYQDVDKHYLSTTWLNDLQQEVKFDMYAYSSGGDDSKYPVTLKISDSQLFVSAQGEDQPVLLKELPETPKLITGSETDLIFFWKSINSKNYFTSAAYPELFIATKEQSRVHLARGLPSMTDFQIS

SEQ ID NO: 48 - protein, 274 aa, Mus musculus
MATTVSTQRGPVYIGELPQDFLRITPTQQQQQIQLDAQAAQQLQYGGTVGTVGRLSITVVQAKLAKNYGMTRMDPYCRLRLGYAVYETPTAHNGAKNPRWNKVIQCTVPPGVDSFYLEIFDERAFSMDDRIAWTHITIPESLKQGQVEDEWYSLSGRQGDDKEGMINLVMSYTSLPAAMMMPPQPVVLMPTVYQQGVGYVPIAGMPAVCSPGMVPMAMPPPAVAPQPRCNEEDLKAIQDMFPNMDREVIRSVLEAQRGNKDAAINSLLQMGEES

SEQ ID NO: 49 - protein, 795 aa, Mus musculus
MTKPNSLIFYCIIVLGLTLMKIQLSEECELIIKRPNANLTRVPKDLPLQTTTLDLSQNNISELQTSDILSLSKLRVLIMSYNRLQYLNISVFKFNTELEYLDLSHNELKVILCHPTVSLKHLDLSFNAFDALPICKEFGNMSQLQFLGLSGSRVQSSSVQLIAHLNISKVLLVLGDAYGEKEDPESLRHVSTETLHIVFPSKREFRFLLDVSVSTTIGLELSNIKCVLEDQGCSYFLRALSKLGKNLKLSNLTLNNVETTWNSFINILQIVWHTPVKYFSISNVKLQGQLAFRMFNYSDTSLKALSIHQVVTDVFSFPQSYIYSIFANMNIQNFTMSGTHMVHMLCPSQVSPFLHVDFTDNLLTDMVFKDCRNLVRLKTLSLQKNQLKNLENIILTSAKMTSLQKLDISQNSLRYSDGGIPCAWTQSLLVLNLSSNMLTGSVFRCLPPKVKVLDLHNNRIMSIPKDVTHLQALQELNVASNSLTDLPGCGAFSSLSVLVIDHNSVSHPSEDFFQSCQNIRSLTAGNNPFQCTCELRDFVKNIGWVAREVVEGWPDSYRCDYPESSRGTALRDFHMSPLSCDTVLLTVTIGATMLVLAVTGAFLCLYFDLPWYVRMLCQWTQTRHRARHIPLEELQRNLQFHAFVSYSGHDSAWVKNELLPNLEKDDIQICLHERNFVPGKSIVENIINFIEKSYKSIFVLSPHFIQSEWCHYELYFAHHNLFHEGSDNLILILLAPIPQYSIPTNYHKLKTLMSRRTYLEWPTEKNKHGLFWANLRASINVKLVNQAEGTCYTQQ

SEQ ID NO: 50 - protein, 333 aa, Yersinia enterocolitica
MIRAYEQNPQHFIEDLEKVRVEQLTGHGSSVLEELVQLVKDKKIDISIKYDPKKDSEVFAERVITDDIELLKKILAYFLPEDAILKGGHYDNQLQNGIKRVKEFLESSPNTQWELRAFMAVMHFSLTADRIDDDILKVIVDSMNHHGDARSKLREELAELTAELKIYSVIQAEINKHLSSSGTINIHEKSINLMDKNLYGYTDEEIFKASAEYKILKKMPQTTIKDDELHEVGVIAGAEKQIVSIKNFLESENKRTGALGNLKDSYSYNKDNNELSHFATACSDKSRPLNDLVSQKTTQLSDITSRFNSAIEALNRFIQKYDSVMQRLLDDTR

SEQ ID NO: 51 - protein, 348 aa, Neisseria gonorrhoeae
MKKSLIALTLAALPVAATADVTLYGAIKAGVQTYRSVEHTDGKVSKVETGSEIADFGSKIGFKGQEDLGNGLKAVWQLEQGASVAGTNTGWGNKQSFVGLKGGFGTIRAGSLNSPLKNTDANVNAWESGKFTGNVLEISGMAKREHRYLSVRYDSPEFAGFSGSVQYAPKDNSGSNGESYHVGLNYQNSGFFAQYAGLFQRYGEGTKKIEYEHQVYSIPSLFVEKLQVHRLVGGYDNNALYVSVAAQQQDAKLYGARRANSHNSQTEVAATAAYRFGNVTPRVSYAHGFKGTVDSADHDNTYDQVVVGAEYDFSKRTSALVSAGWLQEGKGADKIVSTASAVVLRHKF

SEQ ID NO: 52 - protein, 273 aa, Borrelia burgdorferi
MKKYLLGIGLILALIACKQNVSSLDEKNSVSVDLPGEMKVLVSKEKNKDGKYDLIATVDKLELKGTSDKNNGSGVLEGVKADKSKVKLTISDDLGQTTLEVFKEDGKTLVSKKVTSKDKSSTEEKFNEKGEVSEKIITRADGTRLEYTGIKSDGSGKAKEVLKGYVLEGTLTAEKTTLVVKEGTVTLSKNISKSGEVSVELNDTDSSAATKKTAAWNSGTSTLTITVNSKKTKDLVFTKENTITVQQYDSNGTKLEGSAVEITKLDEIKNALK

SEQ ID NO: 53 - protein, 264 aa, Mus musculus
MKAVVLAVALVFLTGSQAWHVWQQDEPQSQWDKVKDFANVYVDAVKDSGRDYVSQFESSSLGQQLNLNLLENWDTLGSTVSQLQERLGPLTRDFWDNLEKETDWVRQEMNKDLEEVKQKVQPYLDEFQKKWKEDVELYRQKVAPLGAELQESARQKLQELQGRLSPVAEEFRDRMRTHVDSLRTQLAPHSEQMRESLAQRLAELKSNPTLNEYHTRAKTHLKTLGEKARPALEDLRHSLMPMLETLKTQVQSVIDKASETLTAQ

SEQ ID NO: 54 - protein, 311 aa, Mus musculus
MKALWAVLLVTLLTGCLAEGEPEVTDQLEWQSNQPWEQALNRFWDYLRWVQTLSDQVQEELQSSQVTQELTALMEDTMTEVKAYKKELEEQLGPVAEETRARLGKEVQAAQARLGADMEDLRNRLGQYRNEVHTMLGQSTEEIRARLSTHLRKMRKRLMRDAEDLQKRLAVYKAGAREGAERGVSAIRERLGPLVEQGRQRTANLGAGAAQPLRDRAQAFGDRIRGRLEEVGNQARDRLEEVREHMEEVRSKMEEQTQQIRLQAEIFQARLKGWFEPIVEDMHRQWANLMEKIQASVATNPIITPVAQENQ

SEQ ID NO: 55 - protein, 1663 aa, Mus musculus
MGPASGSQLLVLLLLLASSPLALGIPMYSIITPNVLRLESEETIVLEAHDAQGDIPVTVTVQDFLKRQVLTSEKTVLTGASGHLRSVSIKIPASKEFNSDKEGHKYVTVVANFGETVVEKAVMVSFQSGYLFIQTDKTIYTPGSTVLYRIFTVDNNLLPVGKTVVILIETPDGIPVKRDILSSNNQHGILPLSWNIPELVNMGQWKIRAFYEHAPKQIFSAEFEVKEYVLPSFEVRVEPTETFYYIDDPNGLEVSIIAKFLYGKNVDGTAFVIFGVQDGDKKISLAHSLTRVVIEDGVGDAVLTRKVLMEGVRPSNADALVGKSLYVSVTVILHSGSDMVEAERSGIPIVTSPYQIHFTKTPKFFKPAMPFDLMVFVTNPDGSPASKVLVVTQGSNAKALTQDDGVAKLSINTPNSRQPLTITVRTKKDTLPESRQATKTMEAHPYSTMHNSNNYLHLSVSRMELKPGDNLNVNFHLRTDPGHEAKIRYYTYLVMNKGKLLKAGRQVREPGQDLVVLSLPITPEFIPSFRLVAYYTLIGASGQREVVADSVWVDVKDSCIGTLVVKGDPRDNHLAPGQQTTLRIEGNQGARVGLVAVDKGVFVLNKKNKLTQSKIWDVVEKADIGCTPGSGKNYAGVFMDAGLAFKTSQGLQTEQRADLECTKPAARRRRSVQLMERRMDKAGQYTDKGLRKCCEDGMRDIPMRYSCQRRARLITQGENCIKAFIDCCNHITKLREQHRRDHVLGLARSELEEDIIPEEDIISRSHFPQSWLWTIEELKEPEKNGISTKVMNIFLKDSITTWEILAVSLSDKKGICVADPYEIRVMQDFFIDLRLPYSVVRNEQVEIRAVLFNYREQEELKVRVELLHNPAFCSMATAKNRYFQTIKIPPKSSVAVPYVIVPLKIGQQEVEVKAAVFNHFISDGVKKTLKVVPEGMRINKTVAIHTLDPEKLGQGGVQKVDVPAADLSDQVPDTDSETRIILQGSPVVQMAEDAVDGERLKHLIVTPAGCGEQNMIGMTPTVIAVHYLDQTEQWEKFGIEKRQEALELIKKGYTQQLAFKQPSSAYAAFNNRPPSTWLTAYVVKVFSLAANLIAIDSHVLCGAVKWLILEKQKPDGVFQEDGPVIHQEMIGGFRNAKEADVSLTAFVLIALQEARDICEGQVNSLPGSINKAGEYIEASYMNLQRPYTVAIAGYALALMNKLEEPYLGKFLNTAKDRNRWEEPDQQLYNVEATSYALLALLLLKDFDSVPPVVRWLNEQRYYGGGYGSTQATFMVFQALAQYQTDVPDHKDLNMDVSFHLPSRSSATTFRLLWENGNLLRSEETKQNEAFSLTAKGKGRGTLSVVAVYHAKLKSKVTCKKFDLRVSIRPAPETAKKPEEAKNTMFLEICTKYLGDVDATMSILDISMMTGFAPDTKDLELLASGVDRYISKYEMNKAFSNKNTLIIYLEKISHTEEDCLTFKVHQYFNVGLIQPGSVKVYSYYNLEESCTRFYHPEKDDGMLSKLCHSEMCRCAEENCFMQQSQEKINLNVRLDKACEPGVDYVYKTELTNIELLDDFDEYTMTIQQVIKSGSDEVQAGQQRKFISHIKCRNALKLQKGKKYLMWGLSSDLWGEKPNTSYIIGKDTWVEHWPEAEECQDQKYQKQCEELGAFTESMVVYGCPN

SEQ ID NO: 56 - protein, 221 aa, Human cytomegalovirus
MNKFSNTRIGFTCAVMALRTLILTVGLLCMRIRSLLCSPAETTVTTAAVTSAHGPLCPLVFQGWAYAVYHQGDMALMTLDVYCCRQTSSNTVVAFSHHPADNTLLIEVGNNTRRHVDGISCQDHFRAQHQDCPAQMVHVRGVNESAFGLTHLQSCCLNEHSQLSERVAYHLKLRPATFGLETWAMYTVGILALGSFSSFYSQIARSLGVLPNDHHYALKKA

SEQ ID NO: 57 - protein, 244 aa, Mus musculus
MSNERVTYAELKVAKNSRNQHRKPRGPRSSISVIEQEIIYSDFSFQNPSQEHPWICRNCPCKGFPSPPEKLIAGTLGLICFVLIVAVVVITTVATPYTEAKAQINSSMTRTHRDINYTLSSAQPCPHCPKEWISYSHNCYFIGMERKSWNDSLVSCISKNCSLLYIDSEEEQDFLQSLSLISWTGILRKGRGQPWVWKEDSIFKPKIAEILHDECNCAMMSASGLTADNCTTLHPYLCKCKFPI

SEQ ID NO: 58 - protein, 303 aa, Mus musculus
MWPLAAALLLGSCCCGSAQLLFSNVNSIEFTSCNETVVIPCIVRNVEAQSTEEMFVKWKLNKSYIFIYDGNKNSTTTDQNFTSAKISVSDLINGIASLKMDKRDAMVGNYTCEVTELSREGKTVIELKNRTVSWFSPNEKILIVIFPILAILLFWGKFGILTLKYKSSHTNKRIILLLVAGLVLTVIVVVGAILLIPGEKPVKNASGLGLIVISTGILILLQYNVFMTAFGMTSFTIAILITQVLGYVLALVGLCLCIMACEPVHGPLLISGLGIIALAELLGLVYMKFVASNQRTIQPPRNR

SEQ ID NO: 59 - protein, 281 aa, Myxoma virus
MIGLLFFVYVVPLAAENEVTVTPYTVCNKTVTLECNLDALIYKDINSVHVKWLFDTMYDTISNKTNGSSITFDFANNLTGNYTCEAYSEFNSVKHVIALTFVHQWFSREEIQFILSLLTIYIILLWGNVCTITFKINNVSKLIHVYSIALWMTLIMFVGQYMIGIDTDMLYVKVNGIILIQLSIFSSIFLQRILHKKLIPSYLLNIVLGLKAVSYTGSTVVIALSFIGCYNKAYGYTYMYKLLFADILELISLIALYTLPLGTQATYKKLYLQSDETFTFL

SEQ ID NO: 60 - protein, 218 aa, Myxoma virus
MRVLSILALLSTVAYAYSVRCTNTTTVAEHVNVTISCNKTSSSSSLFHLITWKKNNETTIAGYGPSGATIKDASKIEYLSTGYNTSTILIKNVSAEDSGLYYCIFNSFSTEPSEEGTVRVNVTTSSATTTLQQPQPQALRTTRGRSTNRSTSRHVSRTSTHHVGDGSLTVETRQYKYSSSSSSSSSSWTSSAGSRNVPSLFKLIFVIKMIFYIPNLIG

SEQ ID NO: 61 - protein, 236 aa, Macaca mulatta
MSGGITLTLLLATLATVRCALQTHYAAVPVHSTASLGCVLTTPHDVLIVTWQKQESPSPVNVATYSSEAGTVVQPPFAGRVDIPEHKLTRTTLKFFNATLEDEGCYLCIFNAFGVGKLSGTACLTVYVPLSMSVTFYPPINPTQLVCRAEASPAPSVNWTGVPPELCSEPEVFPRPNGTTLVVGRCNVTSVDPEDLENATCLVTHIGGLAAARPLDPVFSDPLEGTSHYVTTTWTP

SEQ ID NO: 62 - protein, 253 aa, Macaca mulatta
MSGGITLTLLLATLATVRCALQTHYAAVPVHSTASLGCVLTTPHDVLIVTWQKQESPSPVNVATYSSEAGTVVQPPFAGRVDIPEHKLTRTTLKFFNATLEDEGCYLCIFNAFGVGKLSGTACLTVYVPLSMSVTFYPPINPTQLVCRAEASPAPSVNWTGVPPELCSEPEVFPRPNGTTLVVGRCNVTSVDPEDLENATCLVTHIGGLAAARPLDPVFSDPLEGTSHYVVGVVAAAAVLGIFLTGVFLYRSM

SEQ ID NO: 63 - protein, 284 aa, Rat cytomegalovirus
MNLMFILFYIIISINPTLSQVEVVTQDVNSSLRSPASLRCSLKTTQEPLIVTWQKKKAVGPENMATYSKAHGVVLQPTYKDRINITELGLLNSSITFWNATLDDEGCYMCLFNMFGSGKVSGTSCLTLRYTPSVFISGNLSDNILNVTCSAVSRPNVSITWVPLGDGLKNFTTSQSQSDGTTKVTSVLYGNLTLHNKNVTCRIIYLNTVYNYSVVLDGFYPTPPTSPVSFTSDNSTRTTRTILLLIIIFMILTTVIALLYWRKQRYSRLMRFYRRSVVPLCPKL

SEQ ID NO: 64 - protein, 271 aa, Kaposi's sarcoma-associated herpesvirus
MSSLFISLPWVAFIWLALLGAVGGARVQGPMRGSAALTCAITPRADIVSVTWQKRQLPGPVNVATYSHSYGVVVQTQYRHKANITCPGLWNSTLVIHNLAVDDEGCYLCIFNSFGGRQVSCTACLEVTSPPTGHVQVNSTEDADTVTCLATGRPPPNVTWAAPWNNASSTQEQFTDSDGLTVAWRTVRLPRGDNTTPSEGICLITWGNESISIPASIQGPLAHDLPAAQGTLAGVAITLVGLFGIFALHHCRRKQGGASPTSDDMDPLSTQ

SEQ ID NO: 65 - protein, 278 aa, Mus musculus
MGSLVFRRPFCHLSTYSLIWGMAAVALSTAQVEVVTQDERKALHTTASLRCSLKTSQEPLIVTWQKKKAVSPENMVTYSKTHGVVIQPAYKDRINVTELGLWNSSITFWNTTLEDEGCYMCLFNTFGSQKVSGTACLTLYVQPIVHLHYNYFEDHLNITCSATARPAPAISWKGTGTGIENSTESHFHSNGTTSVTSILRVKDPKTQVGKEVICQVLYLGNVIDYKQSLDKGFWFSVPLLLSIVSLVILLVLISILLYWKRHRNQERGESSQGMQRMK

SEQ ID NO: 66 - protein, 407 aa, Mus musculus
MVSSTWGYDPRAGAGDLVITTTAAGAVTIAVLLFQTVCGDCGPPPDIPNARPILGRHSKFAEQSKVAYSCNNGFKQVPDKSNIVVCLENGQWSSHETFCEKSCDTPERLSFASLKKEYFNMNFFPVGTIVEYECRPGFRKQPSLSGKSTCLEDLVWSPVAQFCKKKSCPNPKDLDNGHINIPTGILFGSEINFSCNPGYRLVGITSILCTIIGNTVDWDDEFPVCTEIFCPDPPKINNGIMRGESDSYKYSQVVIYSCDKGFILFGNSTIYCTVSKSDVGQWSSPPPQCIEESKVPIKKPVVNVPSTGIPSTPQKPTTESVPNPGDQPTPQKPSTVKVPATQHEPDTTTRTSTDKGESNSGGDRYIYGFVAVIAMIDSLIIVKTLWTILSPNRRSDFQGKERKDVSK

SEQ ID NO: 67 - protein, 390 aa, Mus musculus
MIRGRAPRTRPSPPPPLLPLLSLSLLLLSPTVRGDCGPPPDIPNARPILGRHSKFAEQSKVAYSCNNGFKQVPDKSNIVVCLENGQWSSHETFCEKSCVAPERLSFASLKKEYLNMNFFPVGTIVEYECRPGFRKQPPLPGKATCLEDLVWSPVAQFCKKKSCPNPKDLDNGHINIPTGILFGSEINFSCNPGYRLVGVSSTFCSVTGNTVDWDDEFPVCTEIHCPEPPKINNGIMRGESDSYTYSQVVTYSCDKGFILVGNASIYCTVSKSDVGQWSSPPPRCIEKSKVPTKKPTINVPSTGTPSTPQKPTTESVPNPGDQPTPQKPSTVKVSATQHVPVTKTTVRHPIRTSTDKGEPNTGGDRYIYGHTCLITLTVLHVMLSLIGYLT

SEQ ID NO: 68 - protein, 274 aa, Ancylostoma caninum
MEAYLVVLIAIAGIAHSNEHNLRCPQNGTEMPGFNDSIRLQFLAMHNGYRSKLALGHISITEESESDDDDDFGFLPDFAPRASKMRYLEYDCEAEKSAYMSARNCSDSSSPPEGYDENKYIFENSNNISEAALKAMISWAKEAFNLNKTKEGEGVLYRSNHDISNFANLAWDAREKFGCAVVNCPLGEIDDETNHDGETYATTIHVVCHYPKINKTEGQPIYKVGTPCDDCSEYTKKADNTTSADPVCIPDDGVCFIGSKADYDSKEFYRFREL

SEQ ID NO: 69 - protein, 277 aa, Mus musculus
MSSFACWSLSLLILFYSPGSGEKAFEVYIWSEKQIVEATESWKINCSTNCAAPDMGGLETPTNKIMLEEHPQGKWKQFLVSNVSKDTVFFCHFTCSGKQHSESLNIRVYQPPAQVTLKLQPPRVFVGEDFTIECTVSPVQPLERLTLSLLRGRETLKNQTFGGAETVPQEATATFNSTALKKDGLNFSCQAELDLRPHGGYIIRSISEYQILEVYEPMQDNQMVIIIVVVSILLFLFVTSVLLCFIFGQHWHRRRTGTYGVLAAWRRLPRAFRARPV

SEQ ID NO: 70 - protein, 537 aa, Mus musculus
MASTRAKPTLPLLLALVTVVIPGPGDAQVSIHPREAFLPQGGSVQVNCSSSCKEDLSLGLETQWLKDELESGPNWKLFELSEIGEDSSPLCFENCGTVQSSASATITVYSFPESVELRPLPAWQQVGKDLTLRCHVDGGAPRTQLSAVLLRGEEILSRQPVGGHPKDPKEITFTVLASRGDHGANFSCRTELDLRPQGLALFSNVSEARSLRTFDLPATIPKLDTPDLLEVGTQQKLFCSLEGLFPASEARIYLELGGQMPTQESTNSSDSVSATALVEVTEEFDRTLPLRCVLELADQILETQRTLTVYNFSAPVLTLSQLEVSEGSQVTVKCEAHSGSKVVLLSGVEPRPPTPQVQFTLNASSEDHKRSFFCSAALEVAGKFLFKNQTLELHVLYGPRLDETDCLGNWTWQEGSQQTLKCQAWGNPSPKMTCRRKADGALLPIGVVKSVKQEMNGTYVCHAFSSHGNVTRNVYLTVLYHSQNNWTIIILVPVLLVIVGLVMAASYVYNRQRKIRIYKLQKAQEEAIKLKGQAPPP

SEQ ID NO: 71 - protein, 481 aa, Mus musculus
MGSPVQLSLLCVVLASLLLPGKGVFINRERANNVLARTRRANSFFEEFKKGNLERECMEEICSYEEVREIFEDDEKTKEYWTKYKDGDQCESSPCQNQGACRDGIGGYTCTCSEGFEGKNCELFVRKLCRLDNGDCDQFCREEQNSVVCSCASGYFLGNDGKSCISTAPFPCGKITTGRRKRSVALNTSDSELDLEDALLDEDFLSPTENPIELLNLNETQPERSSDDLVRIVGGRECKDGECPWQALLINEDNEGFCGGTILNEFYILTAAHCLHQARRFKVRVGDRNTEKEEGNEMVHEVDVVIKHNKFQRDTYDYDIAVLRLKTPITFRMNVAPACLPQKDWAESTLMTQKTGIVSGFGRTHEKGRQSNILKMLEVPYVDRNTCKLSTSFSITQNMFCAGYEAKLEDACQGDSGGPHVTRFKNTYYVTGIVSWGEGCARKGKYGIYTKVTTFLKWIDRSMKARVGPTAETPRTAGPPN

SEQ ID NO: 72 - protein, 436 aa, Mus musculus
MSWSLQPPSFLLCCLLLLFSPTGLAYVATRDNCCILDERFGSFCPTTCGIADFLSSYQTDVDNDLRTLEDILFRAENRTTEAKELIKAIQVYYNPDQPPKPGMIDSATQKSKKMVEEIVKYEALLLTHETSIRYLQEIYNSNNQKITNLKQKVAQLEAQCQEPCKDSVQIHDTTGKDCQEIANKGAKESGLYFIRPLKAKQQFLVYCEIDGSGNGWTVLQKRIDGSLDFKKNWIQYKEGFGHLSPTGTTEFWLGNEKIHLISMQSTIPYALRIQLKDWNGRTSTADYAMFRVGPESDKYRLTYAYFIGGDAGDAFDGYDFGDDPSDKFFTSHNGMQFSTWDNDNDKFEGNCAEQDGSGWWMNKCHAGHLNGVYHQGGTYSKSSTTNGFDDGIIWATWKSRWYSMKETTMKIIPFNRLSIGEGQQHHMGGSKQAGDV

SEQ ID NO: 73 - protein, 481 aa, Mus musculus
MRHLWLLLLLCVFSVQTQAADDDYDEPTDSLDARGHRPVDRRKEEPPSLRPAPPPISGGGYRARPAKATANQKKVERRPPDAGGCLHADTDMGVLCPTGCTLQQTLLNQERPIKSSIAELNNNIQSVSDTSSVTFQYLTLLKDMWKKKQAQVKENENVINEYSSILEDQRLYIDETVNDNIPLNLRVLRSILEDLRSKIQKLESDISAQMEYCRTPCTVSCNIPVVSGKECEEIIRKGGETSEMYLIQPDTSIKPYRVYCDMKTENGGWTVIQNRQDGSVDFGRKWDPYKKGFGNIATNEDAKKYCGLPGEYWLGNDKISQLTRMGPTELLIEMEDWKGDKVKAHYGGFTVQNEASKYQVSVNKYKGTAGNALMDGASQLVGENRTMTIHNGMFFSTYDRDNDGWVTTDPRKQCSKEDGGGWWYNRCHAANPNGRYYWGGLYSWDMSKHGTDDGVVWMNWKGSWYSMRRMSMKIRPFFPQQ

SEQ ID NO: 74 - protein, 789 aa, Mus musculus
MLSLRVTCLILSVASTVWTTDTEDKGEFLSEGGGVRGPRVVERHQSQCKDSDWPFCSDDDWNHKCPSGCRMKGLIDEANQDFTNRINKLKNSLFDFQRNNKDSNSLTRNIMEYLRGDFANANNFDNTYGQVSEDLRRRIEILRRKVIEKAQQIQALQSNVRAQLIDMKRLEVDIDIKIRSCKGSCSRAVNREINLQDYEGHQKQLQQVIAKELLPTKDRQYLPALKMSPVPDLVPGSFKSQLQEAPPEWKALTEMRQMRMELERPGKDGGSRGDSPGDSRGDSRGDFATRGPGSKAENPTNPGPGGSGYWRPGNSGSGSDGNRNPGTTGSDGTGDWGTGSPRPGSDSGNFRPANPNWGVFSEFGDSSSPATRKEYHTGKAVTSKGDKELLIGKEKVTSSGTSTTHRSCSKTITKTVTGPDGRREVVKEVITSDDGSDCGDATELDISHSFSGSLDELSERHPDLSGFFDNHFGLISPNFKEFGSKTHSDSDILTNIEDPSSHVPEFSSSSKTSTVKKQVTKTYKMADEAGSEAHREGETRNTKRGRARARPTRDCDDVLQTQTSGAQNGIFSIKPPGSSKVFSVYCDQETSLGGWLLIQQRMDGSLNFNRTWQDYKRGFGSLNDKGEGEFWLGNDYLHLLTLRGSVLRVELEDWAGKEAYAEYHFRVGSEAEGYALQVSSYRGTAGDALVQGSVEEGTEYTSHSNMQFSTFDRDADQWEENCAEVYGGGWWYNSCQAANLNGIYYPGGTYDPRNNSPYEIENGVVWVPFRGADYSLRAVRMKIRPLVGQ

SEQ ID NO: 75 - protein, 1170 aa, Mus musculus
MELLRGLGVLFLLHMCGSNRIPESGGDNGVFDIFELIGGARRGPGRRLVKGQDLSSPAFRIENANLIPAVPDDKFQDLLDAVWADKGFIFLASLRQMKKTRGTLLAVERKDNTGQIFSVVSNGKAGTLDLSLSLPGKQQVVSVEEALLATGQWKSITLFVQEDRAQLYIDCDKMESAELDVPIQSIFTRDLASVARLRVAKGDVNDNFQGVLQNVRFVFGTTPEDILRNKGCSSSTNVLLTLDNNVVNGSSPAIRTNYIGHKTKDLQAICGLSCDELSSMVLELKGLRTIVTTLQDSIRKVTEENRELVSELKRPPLCFHNGVQYKNNEEWTVDSCTECHCQNSVTICKKVSCPIMPCSNATVPDGECCPRCWPSDSADDGWSPWSEWTSCSATCGNGIQQRGRSCDSLNNRCEGSSVQTRTCHIQECDKRFKQDGGWSHWSPWSSCSVTCGDGVITRIRLCNSPSPQMNGKPCEGEARETKACKKDACPINGGWGPWSPWDICSVTCGGGVQRRSRLCNNPTPQFGGKDCVGDVTENQVCNKQDCPIDGCLSNPCFAGAKCTSYPDGSWKCGACPPGYSGNGIQCKDVDECKEVPDACFNHNGEHRCKNTDPGYNCLPCPPRFTGSQPFGRGVEHAMANKQVCKPRNPCTDGTHDCNKNAKCNYLGHYSDPMYRCECKPGYAGNGIICGEDTDLDGWPNENLVCVANATYHCKKDNCPNLPNSGQEDYDKDGIGDACDDDDDNDKIPDDRDNCPFHYNPAQYDYDRDDVGDRCDNCPYNHNPDQADTDKNGEGDACAVDIDGDGILNERDNCQYVYNVDQRDTDMDGVGDQCDNCPLEHNPDQLDSDSDLIGDTCDNNQDIDEDGHQNNLDNCPYVPNANQADHDKDGKGDACDHDDDNDGIPDDRDNCRLVPNPDQKDSDGDGRGDACKDDFDHDNVPDIDDICPENFDISETDFRRFQMIPLDPKGTSQNDPNWVVRHQGKELVQTVNCDPGLAVGYDEFNAVDFSGTFFINTERDDDYAGFVFGYQSSSRFYVVMWKQVTQSYWDTNPTRAQGYSGLSVKVVNSTTGPGEHLRNALWHTGNTPGQVRTLWHDPRHIGWKDFTAYRWRLSHRPKTGYIRVVMYEGKKIMADSGPIYDKTYAGGRLGLFVFSQEMVFFSDMKYECRDS

SEQ ID NO: 76 - protein, 119 aa, Mus musculus
MAGSATIVAGLLLLVACACCIFPIDSVTIPSSCCTSFISKKIPENRVVSYQLANGSICPKAGVIFITKKGHKICTDPKLLWVQRHIQKLDAKKNQPSKGAKAVRTKFAVQRRRGNSTEV

SEQ ID NO: 77 - protein, 395 aa, Mus musculus
MAPSPLAWLLRLAAFFHLCTLLPGQHLGMTKCEIMCDKMTSRIPVALLIRYQLNQESCGKRAIVLETTQHRRFCADPKEKWVQDAMKHLDHQAAALTKNGGKFEKRVDNVTPGITLATRGLSPSALTKPESATLEDLALELTTISQEARGTMGTSQEPPAAVTGSSLSTSEAQDAGLTAKPQSIGSFEAADISTTVWPSPAVYQSGSSSWAEEKATESPSTTAPSPQVSTTSPSTPEENVGSEGQPPWVQGQDLSPEKSLGSEEINPVHTDNFQERGPGNTVHPSVAPISSEETPSPELVASGSQAPKIEEPIHATADPQKLSVLITPVPDTQAATRRQAVGLLAFLGLLFCLGVAMFAYQSLQGCPRKMAGEMVEGLRYVPRSCGSNSYVLVPV

SEQ ID NO: 78 - protein, 100 aa, Mus musculus
MAPPTCRLLSAALVLLLLLATNHQATGAVVASELRCQCLKTLPRVDFKNIQSLSVTPPGPHCAQTEVIATLKGGQKVCLDPEAPLVQKIIQKILNKGKAN

SEQ ID NO: 79 - protein, 93 aa, Mus musculus
MFFDLGLLVLLAIFLSVQLGVATGGSSIAMSCCPNFSYYVIPWSWVYSYKFTDKSCTSDGVIFFTKTGKQFCVQPGAKWVQRFISLVNTRNHL

SEQ ID NO: 80 - protein, 92 aa, Mus musculus
MATLRVPLLVALVLLAVAIQTSDAGPYGANVEDSICCQDYIRHPLPSRLVKEFFWTSKSCRKPGVVLITVKNRDICADPRQVWVKKLLHKLS

SEQ ID NO: 81 - protein, 97 aa, Mus musculus
MACGGKRLLFLALAWVLLAHLCSQAEAASNYDCCLSYIQTPLPSRAIVGFTRQMADEACDINAIIFHTKKRKSVCADPKQNWVKRAVNLLSLRVKKM

SEQ ID NO: 82 - protein, 103 aa, Mus musculus
MKTFTSAFGTMRSLQMLLLAALLLGTFLQHARAARATNVGRECCLDYFKGAIPIRKLVSWYKTSVECSRDAIVFLTVQGKLICADPKDKHVKKAIRLVKNPRP

SEQ ID NO: 83 - protein, 97 aa, Mus musculus
MQSSTALLFLLLTVTSFTSQVLAHPGSIPTSCCFIMTSKKIPNTLLKSYKRITNNRCTLKAIVFKTRLGKEICADPKKKWVQDATKHLDQKLQTPKP

SEQ ID NO: 84 - protein, 97 aa, Mus musculus
MRISATLLCLLLIAAAFSIQVWAQPDGPNASTCCYVKKQKIPKRNLKSYRRITSSRCPWEAVIFKTKKGMEVCAEAHQKWVEEAIAYLDMKTPTPKP

SEQ ID NO: 85 - protein, 91 aa, Mus musculus
MKISAAALTIILTAAALCTPAPASPYGSDTTPCCFAYLSLALPRAHVKEYFYTSSKCSNLAVVFVTRRNRQVCANPEKKWVQEYINYLEMS

SEQ ID NO: 86 - protein, 92 aa, Mus musculus
MKLCVSALSLLLLVAAFCAPGFSAPMGSDPPTSCCFSYTSRQLHRSFVMDYYETSSLCSKPAVVFLTKRGRQICANPSEPWVTEYMSDLELN

SEQ ID NO: 87 - protein, 92 aa, Mus musculus
MKVSTTALAVLLCTMTLCNQVFSAPYGADTPTACCFSYSRKIPRQFIVDYFETSSLCSQPGVIFLTKRNRQICADSKETWVQEYITDLELNA

SEQ ID NO: 88 - protein, 109 aa, Mus musculus
MRLSTATLLLLLASCLSPGHGILEAHYTNLKCRCSGVISTVVGLNIIDRIQVTPPGNGCPKTEVVIWTKMKKVICVNPRAKWLQRLLRHVQSKSLSSTPQAPVSKRRAA

SEQ ID NO: 89 - protein, 119 aa, Mus musculus
MDAKVVAVLALVLAALCISDGKPVSLSYRCPCRFFESHIARANVKHLKILNTPNCALQIVARLKNNNRQVCIDPKLKWIQEYLEKALNKGRREEKVGKKEKIGKKKRQKKRKAAQKRKN

SEQ ID NO: 90 - protein, 93 aa, Mus musculus
MDAKVVAVLALVLAALCISDGKPVSLSYRCPCRFFESHIARANVKHLKILNTPNCALQIVARLKNNNRQVCIDPKLKWIQEYLEKALNKRLKM

SEQ ID NO: 91 - protein, 100 aa, Mus musculus
MNRKVTAIALAAIIWATAAQGFLMFKQGRCLCIGPGMKAVKMAEIEKASVIYPSNGCDKVEVIVTMKAHKRQRCLDPRSKQARLIMQAIEKKNFLRRQNM

SEQ ID NO: 92 - protein, 98 aa, Mus musculus
MNPSAAVIFCLILLGLSGTQGIPLARTVRCNCIHIDDGPVRMRAIGKLEIIPASLSCPRVEIIATMKKNDEQRCLNPESKTIKNLMKAFSQKRSKRAP

SEQ ID NO: 93 - protein, 126 aa, Mus musculus
MKSAVLFLLGIIFLEQCGVRGTLVIRNARCSCISTSRGTIHYKSLKDLKQFAPSPNCNKTEIIATLKNGDQTCLDPDSANVKKLMKEWEKKISQKKKQKRGKKHQKNMKNRKPKTPQSRRRSRKTT

SEQ ID NO: 94 - protein, 99 aa, Homo sapiens
MTSKLAVALLAAFLISAALCEGAVLPRSAKELRCQCIKTYSKPFHPKFIKELRVIESGPHCANTEIIVKLSDGRELCLDPKENWVQRVVEKFLKRAENS

SEQ ID NO: 95 - protein, 113 aa, Mus musculus
MGFRLRPTSSCTRACPLHNLQILLLLGLILVALAPLTAGKSDGMDPYIELRCRCTNTISGIPFNSISLVNVYRPGVHCADVEVIATLKNGQKTCLDPNAPGVKRIVMKILEGY

SEQ ID NO: 96 - protein, 132 aa, Mus musculus
MSLQLRSSARIPSGSISPFMRMAPLAFLLLFTLPQHLAEAAPSSVIAATELRCVCLTVTPKINPKLIANLEVIPAGPQCPTVEVIAKLKNQKEVCLDPEAPVIKKIIQKILGSDKKKAKRNALAVERTASVQ

SEQ ID NO: 97 - protein, 96 aa, Mus musculus
MIPATRSLLCAALLLLATSRLATGAPIANELRCQCLQTMAGIHLKNIQSLKVLPSGPHCTQTEVIATLKNGREACLDPEAPLVQKIVQKMLKGVPK

SEQ ID NO: 98 - protein, 324 aa, Mus musculus
AKTTPPSVYPLAPGSAAQTNSMVTLGCLVKGYFPEPVTVTWNSGSLSSGVHTFPAVLQSDLYTLSSSVTVPSSPRPSETVTCNVAHPASSTKVDKKIVPRDCGCKPCICTVPEVSSVFIFPPKPKDVLTITLTPKVTCVVVDISKDDPEVQFSWFVDDVEVHTAQTQPREEQFNSTFRSVSELPIMHQDWLNGKEFKCRVNSAAFPAPIEKTISKTKGRPKAPQVYTIPPPKEQMAKDKVSLTCMITDFFPEDITVEWQWNGQPAENYKNTQPIMNTNGSYFVYSKLNVQKSNWEAGNTFTCSVLHEGLHNHHTEKSLSHSPGK

SEQ ID NO: 99 - protein, 421 aa, Mus musculus
SIRNPQLYPLKPCKGTASMTLGCLVKDYFPNPVTVTWYSDSLNMSTVNFPALGSELKVTTSQVTSWGKSAKNFTCHVTHPPSFNESRTILVRPVNITEPTLELLHSSCDPNAFHSTIQLYCFIYGHILNDVSVSWLMDDREITDTLAQTVLIKEEGKLASTCSKLNITEQQWMSESTFTCKVTSQGVDYLAHTRRCPDHEPRGVITYLIPPSPLDLYQNGAPKLTCLVVDLESEKNVNVTWNQEKKTSVSASQWYTKHHNNATTSITSILPVVAKDWIEGYGYQCIVDHPDFPKPIVRSITKTPGQRSAPEVYVFPPPEEESEDKRTLTCLIQNFFPEDISVQWLGDGKLISNSQHSTTTPLKSNGSNQGFFIFSRLEVAKTLWTQRKQFTCQVIHEALQKPRKLEKTISTSLGNTSLRPS

SEQ ID NO: 100 - protein, 454 aa, Mus musculus
SQSFPNVFPLVSCESPLSDKNLVAMGCLARDFLPSTISFTWNYQNNTEVIQGIRTFPTLRTGGKYLATSQVLLSPKSILEGSDEYLVCKIHYGGKNRDLHVPIPAVAEMNPNVNVFVPPRDGFSGPAPRKSKLICEATNFTPKPITVSWLKDGKLVESGFTTDPVTIENKGSTPQTYKVISTLTISEIDWLNLNVYTCRVDHRGLTFLKNVSSTCAASPSTDILTFTIPPSFADIFLSKSANLTCLVSNLATYETLNISWASQSGEPLETKIKIMESHPNGTFSAKGVASVCVEDWNNRKEFVCTVTHRDLPSPQKKFISKPNEVHKHPPAVYLLPPAREQLNLRESATVTCLVKGFSPADISVQWLQRGQLLPQEKYVTSAPMPEPGAPGFYFTHSILTVTEEEWNSGETYTCVVGHEALPHLVTERTVDKSTGKPTLYNVSLIMSDTGGTCY

SEQ ID NO: 101 - protein, 257 aa, Mus musculus
DKKEPDMFLLSECKAPEENEKINLGCLVIGSQPLKISWEPKKSSIVEHVFPSEMRNGNYTMVLQVTVLASELNLNHTCTINKPKRKEKPFKFPESWDSQSSKRVTPTLQAKNHSTEATKAITTKKDIEGAMAPSNLTVNILTTSTHPEMSSWLLCEVSGFFPENIHLMWLGVHSKMKSTNFVTANPTAQPGGTFQTWSVLRLPVALSSSLDTYTCVVEHEASKTKLNASKSLAISGCYHLLPESDGPSRRPDGPALA

SEQ ID NO: 102 - protein, 344 aa, Mus musculus
ESARNPTIYPLTLPPALSSDPVIIGCLIHDYFPSGTMNVTWGKSGKDITTVNFPPALASGGRYTMSNQLTLPAVECPEGESVKCSVQHDSNPVQELDVNCSGPTPPPPITIPSCQPSLSLQRPALEDLLLGSDASITCTLNGLRNPEGAVFTWEPSTGKDAVQKKAVQNSCGCYSVSSVLPGCAERWNSGASFKCTVTHPESGTLTGTIAKVTVNTFPPQVHLLPPPSEELALNELLSLTCLVRAFNPKEVLVRWLHGNEELSPESYLVFEPLKEPGEGATTYLVTSVLRVSAETWKQGDQYSCMVGHEALPMNFTQKTIDRLSGKPTNVSVSVIMSEGDGICY

SEQ ID NO: 103 - protein, 1680 aa, Mus musculus
MGLWGILCLLIFLDKTWGQEQTYVISAPKILRVGSSENVVIQVHGYTEAFDATLSLKSYPDKKVTFSSGYVNLSPENKFQNAALLTLQPNQVPREESPVSHVYLEVVSKHFSKSKKIPITYNNGILFIHTDKPVYTPDQSVKIRVYSLGDDLKPAKRETVLTFIDPEGSEVDIVEENDYTGIISFPDFKIPSNPKYGVWTIKANYKKDFTTTGTAYFEIKEYVLPRFSVSIELERTFIGYKNFKNFEITVKARYFYNKVVPDAEVYAFFGLREDIKDEEKQMMHKATQAAKLVDGVAQISFDSETAVKELSYNSLEDLNNKYLYIAVTVTESSGGFSEEAEIPGVKYVLSPYTLNLVATPLFVKPGIPFSIKAQVKDSLEQAVGGVPVTLMAQTVDVNQETSDLETKRSITHDTDGVAVFVLNLPSNVTVLKFEIRTDDPELPEENQASKEYEAVAYSSLSQSYIYIAWTENYKPMLVGEYLNIMVTPKSPYIDKITHYNYLILSKGKIVQYGTREKLFSSTYQNINIPVTQNMVPSARLLVYYIVTGEQTAELVADAVWINIEEKCGNQLQVHLSPDEYVYSPGQTVSLDMVTEADSWVALSAVDRAVYKVQGNAKRAMQRVFQALDEKSDLGCGAGGGHDNADVFHLAGLTFLTNANADDSHYRDDSCKEILRSKRNLHLLRQKIEEQAAKYKHSVPKKCCYDGARVNFYETCEERVARVTIGPLCIRAFNECCTIANKIRKESPHKPVQLGRIHIKTLLPVMKADIRSYFPESWLWEIHRVPKRKQLQVTLPDSLTTWEIQGIGISDNGICVADTLKAKVFKEVFLEMNIPYSVVRGEQIQLKGTVYNYMTSGTKFCVKMSAVEGICTSGSSAASLHTSRPSRCVFQRIEGSSSHLVTFTLLPLEIGLHSINFSLETSFGKDILVKTLRVVPEGVKRESYAGVILDPKGIRGIVNRRKEFPYRIPLDLVPKTKVERILSVKGLLVGEFLSTVLSKEGINILTHLPKGSAEAELMSIAPVFYVFHYLEAGNHWNIFYPDTLSKRQSLEKKIKQGVVSVMSYRNADYSYSMWKGASASTWLTAFALRVLGQVAKYVKQDENSICNSLLWLVEKCQLENGSFKENSQYLPIKLQGTLPAEAQEKTLYLTAFSVIGIRKAVDICPTMKIHTALDKADSFLLENTLPSKSTFTLAIVAYALSLGDRTHPRFRLIVSALRKEAFVKGDPPIYRYWRDTLKRPDSSVPSSGTAGMVETTAYALLASLKLKDMNYANPIIKWLSEEQRYGGGFYSTQDTINAIEGLTEYSLLLKQIHLDMDINVAYKHEGDFHKYKVTEKHFLGRPVEVSLNDDLVVSTGYSSGLATVYVKTVVHKISVSEEFCSFYLKIDTQDIEASSHFRLSDSGFKRIIACASYKPSKEESTSGSSHAVMDISLPTGIGANEEDLRALVEGVDQLLTDYQIKDGHVILQLNSIPSRDFLCVRFRIFELFQVGFLNPATFTVYEYHRPDKQCTMIYSISDTRLQKVCEGAACTCVEADCAQLQAEVDLAISADSRKEKACKPETAYAYKVRITSATEENVFVKYTATLLVTYKTGEAADENSEVTFIKKMSCTNANLVKGKQYLIMGKEVLQIKHNFSFKYIYPLDSSTWIEYWPTDTTCPSCQAFVENLNNFAEDLFLNSCE

SEQ ID NO: 104 - protein, 101 aa, Mus musculus
MARPLEEALDVIVSTFHKYSGKEGDKFKLNKTELKELLTRELPSFLGKRTDEAAFQKVMSNLDSNRDNEVDFQEYCVFLSCIAMMCNEFFEGCPDKEPRKK

SEQ ID NO: 105 - protein, 771 aa, Mus musculus
MLGLRPSLLLALAGLFFLGSAVSQECTKYKVSSCRDCIQSGPGCSWCQKLNFTGPGEPDSLRCDTRAQLLLKGCPADDIMDPRSIANPEFDQRGQRKQLSPQKVTLYLRPGQAAAFNVTFRRAKGYPIDLYYLMDLSYSMLDDLNNVKKLGGDLLQALNEITESGRIGFGSFVDKTVLPFVNTHPEKLRNPCPNKEKACQPPFAFRHVLKLTDNSNQFQTEVGKQLISGNLDAPEGGLDAIMQVAACPEEIGWRNVTRLLVFATDDGFHFAGDGKLGAILTPNDGRCHLEDNMYKRSNEFDYPSVGQLAHKLSESNIQPIFAVTKKMVKTYEKLTEIIPKSAVGELSDDSSNVVQLIKNAYYKLSSRVFLDHSTLPDTLKVTYDSFCSNGASSIGKSRGDCDGVQINNPVTFQVKVMASECIQEQSFVIRALGFTDTVTVQVRPQCECQCRDQSREQSLCGGKGVMECGICRCESGYIGKNCECQTQGRSSQELERNCRKDNSSIVCSGLGDCICGQCVCHTSDVPNKEIFGQYCECDNVNCERYNSQVCGGSDRGSCNCGKCSCKPGYEGSACQCQRSTTGCLNARLVECSGRGHCQCNRCICDEGYQPPMCEDCPSCGSHCRDNHTSCAECLKFDKGPFEKNCSVQCAGMTLQTIPLKKKPCKERDSEGCWITYTLQQKDGRNIYNIHVEDSLECVKGPNVAAIVGGTVVGVVLIGVLLLVIWKALTHLTDLREYRRFEKEKLKSQWNNDNPLFKSATTTVMNPKFAES

SEQ ID NO: 106 - protein, 1153 aa, Mus musculus
MTLKALLVTALALCHGFNLDTEHPMTFQENAKGFGQNVVQLGGTSVVVAAPQEAKAVNQTGALYQCDYSTSRCHPIPLQVPPEAVNMSLGLSLAVSTVPQQLLACGPTVHQNCKENTYVNGLCYLFGSNLLRPPQQFPEALRECPQQESDIVFLIDGSGSINNIDFQKMKEFVSTVMEQFKKSKTLFSLMQYSDEFRIHFTFNDFKRNPSPRSHVSPIKQLNGRTKTASGIRKVVRELFHKTNGARENAAKILVVITDGEKFGDPLDYKDVIPEADRAGVIRYVIGVGNAFNKPQSRRELDTIASKPAGEHVFQVDNFEALNTIQNQLQEKIFAIEGTQTGSTSSFEHEMSQEGFSASITSNGPLLGSVGSFDWAGGAFLYTSKDKVTFINTTRVDSDMNDAYLGYASAVILRNRVQSLVLGAPRYQHIGLVVMFRENFGTWEPHTSIKGSQIGSYFGASLCSVDMDADGNTNLILIGAPHYYEKTRGGQVSVCPLPRGRARWQCEALLHGDQGHPWGRFGAALTVLGDVNGDKLTDVAIGAPGEQENQGAVYIFYGASIASLSASHSHRIIGAHFSPGLQYFGQSLSGGKDLTMDGLMDLAVGAQGHLLLLRAQPVLRLEATMEFSPKKVARSVFACQEQVLKNKDAGEVRVCLRVRKNTKDRLREGDIQSTVTYDLALDPVRSRIRAFFDETKNNTRRRTQVFGLMQKCETLKLILPDCVDDSVSPIILRLNYTLVGEPLRSFGNLRPVLAMDAQRFFTAMFPFEKNCGNDSICQDDLSITMSAMGLDTLVVGGPQDFNMSVTLRNDGEDSYGTQVTVYYPSGLSYRKDSASQNPLTKKPWFVKPAESSSSSEGHGALKSTTWNINHPIFPANSEVTFNVTFDVDSHASFGNKLLLKAIVASENNMSRTHKTKFQLELPVKYAIYMIVTSDESSIRYLNFTASEMTSKVIQHQYQFNNLGQRSLPVSVVFWIPVQINNVTVWDHPQVIFSQNLSSACHTEQKSPPHSNFRDQLERTPVLNCSVAVCKRIQCDLPSFNTQEIFNVTLKGNLSFDWYIKTSHGHLLLVSSTEILFNDSAFALLPGQESYVRSKTETKVEPYEVHNPVPLIVGSSIGGLVLLALITAGLYKLGFFKRQYKDMMNEAAPQDAPPQ

SEQ ID NO: 107 - protein, 770 aa, Mus musculus
MLPSLALLLLAAWTVRALEVPTDGNAGLLAEPQIAMFCGKLNMHMNVQNGKWESDPSGTKTCIGTKEGILQYCQEVYPELQITNVVEANQPVTIQNWCKRGRKQCKTHTHIVIPYRCLVGEFVSDALLVPDKCKFLHQERMDVCETHLHWHTVAKETCSEKSTNLHDYGMLLPCGIDKFRGVEFVCCPLAEESDSVDSADAEEDDSDVWWGGADTDYADGGEDKVVEVAEEEEVADVEEEEADDDEDVEDGDEVEEEAEEPYEEATERTTSTATTTTTTTESVEEVVREVCSEQAETGPCRAMISRWYFDVTEGKCVPFFYGGCGGNRNNFDTEEYCMAVCGSVSTQSLLKTTSEPLPQDPDKLPTTAASTPDAVDKYLETPGDENEHAHFQKAKERLEAKHRERMSQVMREWEEAERQAKNLPKADKKAVIQHFQEKVESLEQEAANERQQLVETHMARVEAMLNDRRRLALENYITALQAVPPRPHHVFNMLKKYVRAEQKDRQHTLKHFEHVRMVDPKKAAQIRSQVMTHLRVIYERMNQSLSLLYNVPAVAEEIQDEVDELLQKEQNYSDDVLANMISEPRISYGNDALMPSLTETKTTVELLPVNGEFSLDDLQPWHPFGVDSVPANTENEVEPVDARPAADRGLTTRPGSGLTNIKTEEISEVKMDAEFGHDSGFEVRHQKLVFFAEDVGSNKGAIIGLMVGGVVIATVIVITLVMLKKKQYTSIHHGVVEVDAAVTPEERHLSKMQQNGYENPTYKFFEQMQN

SEQ ID NO: 108 - protein, 99 aa, Mus musculus
MPTQLEMAMDTMIRIFHRYSCKEGDRFKLNKGELKMLLQRELTEFLTCQKDPQLVDKIMQDLDANKDNEVDFNEFVVMVAALTVACNDYFVEQMKKKGK

SEQ ID NO: 109 - protein, 95 aa, Homo sapiens
MTELETAMGMIIDVFSRYSGSEGSTQTLTKGELKVLMEKELPGFLQSGKDKDAVDKLLKDLDANGDAQVDFSEFIVFVAAITSACHKYFEKAGLK

SEQ ID NO: 110 - protein, 108 aa, Mus musculus
MPDTPVEDSLFQIIHCFHHYAAREGDKETLSLEELKALLLDSVPRFMDTLGRRQPYYITELFRAADKNKDNQICFDEFLYILGKLVKDYHLQFHRQLCAHYCTEHSLY

SEQ ID NO: 111 - protein, 92 aa, Mus musculus
MSELEKAMVALIDVFHQYSGREGDKHKLKKSELKELINNELSHFLEEIKEQEVVDKVMETLDEDGDGECDFQEFMAFVAMVTTACHEFFEHE

SEQ ID NO: 112 - protein, 113 aa, Mus musculus
MANKAPSQMERSITTIIDTFHQYSRKEGHPDTLSKKEFRQMVEAQLATFMKKEKRNEALINDIMEDLDTNQDNQLSFEECMMLMAKLIFACHEKLHENNPRGHGHSHGKGCGK

SEQ ID NO: 113 - protein, 89 aa, Mus musculus
MPSELEKALSNLIDVYHNYSNIQGNHHALYKNDFKKMVTTECPQFVQNINIENLFRELDINSDNAINFEEFLAMVIKVGVASHKDSHKE

SEQ ID NO: 114 - protein, 92 aa, Homo sapiens
MTKLEEHLEGIVNIFHQYSVRKGHFDTLSKGELKQLLTKELANTIKNIKDKAVIDEIFQGLDANQDEQVDFQEFISLVAIALKAAHYHTHKE

SEQ ID NO: 115 - protein, 215 aa, Mus musculus
MGKGDPKKPRGKMSSYAFFVQTCREEHKKKHPDASVNFSEFSKKCSERWKTMSAKEKGKFEDMAKADKARYEREMKTYIPPKGETKKKFKDPNAPKRPPSAFFLFCSEYRPKIKGEHPGLSIGDVAKKLGEMWNNTAADDKQPYEKKAAKLKEKYEKDIAAYRAKGKPDAAKKGVVKAEKSKKKKEEEDDEEDEEDEEEEEEEEDEDEEEDDDDE

SEQ ID NO: 116 - protein, 495 aa, Dengue virus
MRCVGIGNRDFVEGLSGATWVDVVLEHGSCVTTMAKDKPTLDIELLKTEVTNPAVLRKLCIEAKISNTTTDSRCPTQGEATLVEEQDTNFVCRRTFVDRGWGNGCGLFGKGSLITCAKFKCVTKLEGKIVQYENLKYSVIVTVHTGDQHQVGNETTEHGTTATITPQAPTSEIQLTDYGALTLDCSPRTGLDFNEMVLLTMEKKSWLVHKQWFLDLPLPWTSGASTSQETWNRQDLLVTFKTAHAKKQEVVVLGSQEGAMHTALTGATEIQTSGTTTIFAGHLKCRLKMDKLTLKGMSYVMCTGSFKLEKEVAETQHGTVLVQVKYEGTDAPCKIPFSSQDEKGVTQNGRLITANPIVTDKEKPVNIEAEPPFGESYIVVGAGEKALKLSWFKKGSSIGKMFEATARGARRMAILGDTAWDFGSIGGVFTSVGKLIHQIFGTAYGVLFSGVSWTMKIGIGILLTWLGLNSRSTSLSMTCIAVGMVTLYLGVMVQA

SEQ ID NO: 117 - protein, 495 aa, Dengue virus
MRCIGISNRDFVEGVSGGSWVDIVLEHGSCVTTMAKNKPTLDFELIKTEAKHPATLRKYCVEAKLTNTTTASRCPTQGEPSLNEEQDKRFVCKHSMVDRGWGNGCGLFGKGGIVTCAMFTCKKNMEGKVVQPENLEYTIVITPHSGEENAVGNDTGKHGKEIKVTPQSSITEAELTGYGTVTMECSPRTGLDFNEMVLLQMENKAWLVHRQWFLDLPLPWLPGADTQGSNWIQKETLVTFKNPHAKKQDVVVLGSQEGAMHTALTGATEIQMSSGNLLFTGHLKCRLRMDKLQLKGMSYSMCTGKFKVVKEIAETQHGTIVIRVQYEGDGSPCKIPFEIMDLEKRHVLGRLITVNPIVTEKDSPVNIEAEPPFGDSYIIIGVEPGQLKLSWFKKGSSIGQMFETTMRGAKRMAILGDTAWDFGSLGGVFTSIGKALHQVFGAIYGAAFSGVSWTMKILIGVVITWIGMNSRSTSLSVSLVLVGVVTLYLGVMVQA

SEQ ID NO: 118 - protein, 493 aa, Dengue virus
MRCVGVGNRDFVEGLSGATWVDVVLEHGGCVTTMAKNKPTLDIELQKTEATQLATLRKLCIEGKITNITTDSRCPTQGEAILPEEQDQNYVCKHTYVDRGWGNGCGLFGKGSLVTCAKFQCLESIEGKVVQHENLKYTVIITVHTGDQHQVGNETQGVTAEITPQASTAEAISPEYGTLGLECSPRTGLDFNEMILLTMKNKAWMVHRQWFFDLPLPWTSGATTKTPTWNRKELLVTFKNAHAKKQEVVVLGSQEGAMHTALTGATEIQTSGGTSIFAGHLKCRLKMDKLKLKGMSYAMCLNTFVLKKEVSETQHGTILIKVEYKGEDAPCKIPFSTEDGQGKAHNGRLITANPVVTKKEEPVNIEAEPPFGESNIVIGIGDKALKINWYRKGSSIGKMFEATARGARRMAILGDTAWDFGSVGGVLNSLGKMVHQIFGSAYTALFSGVSWIMKIGIGVLLTWIGLNSKNTSMSFSCIAIGIITLYLGVVVQA

SEQ ID NO: 119 - protein, 495 aa, Dengue virus
MRCVGVGNRDFVEGVSGGAWVDLVLEHGGCVTTMAQGKPTLDFELTKTTAKEVALLRTYCIEASISNITTATRCPTQGEPYLKEEQDQQYICRRDVVDRGWGNGCGLFGKGGVVTCAKFSCSGKITGNLVQIENLEYTVVVTVHNGDTHAVGNDTSNHGVTAMITPRSPSVEVKLPDYGELTLDCEPRSGIDFNEMILMKMKKKTWLVHKQWFLDLPLPWTAGADTSEVHWNYKERMVTFKVPHAKRQDVTVLGSQEGAMHSALAGATEVDSGDGNHMFAGHLKCKVRMEKLRIKGMSYTMCSGKFSIDKEMAETQHGTTVVKVKYEGAGAPCKVPIEIRDVNKEKVVGRIISSTPLAENTNSVTNIELEPPFGDSYIVIGVGNSALTLHWFRKGSSIGKMFESTYRGAKRMAILGETAWDFGSVGGLFTSLGKAVHQVFGSVYTTMFGGVSWMIRILIGFLVLWIGTNSRNTSMAMTCIAVGGITLFLGFTVQA

SEQ ID NO: 120 - protein, 508 aa, Histoplasma capsulatum
MKLQLAAVATLAVLTSPAFGRVLPDGKYVKIPFTKKKNGDNGELSKRSNGHEKFVLANEQSFYSVELAIGTPSQNLTVLLDTGSADLWVPGKGNPYCGSVMDCDQYGVFDKTKSSTFKANKSSPFYAAYGDGTYAEGAFGQDKLKYNELDLSGLSFAVANESNSTFGVLGIGLSTLEVTYSGKVAIMDKRSYEYDNFPLFLKHSGAIDATAYSLFLNDESQSSGSILFGAVDHSKYEGQLYTIPLVNLYKSQGYQHPVAFDVTLQGLGLQTDKRNITLTTTKLPALLDSGTTLTYLPSQAVALLAKSLNASYSKTLGYYEYTCPSSDNKTSVAFDFGGFRINAPLSDFTMQTSVGTCVLAIIPQAGNATAILGDSFLRNAYVVYDLDNYEISLAQAKYGTGKENVEVIKSTVPSAIRAPSYNNTWSNYASATSGGNIFTTVRTFNGTSTATTTRSTTTKKTNSTTTAKSTHKSKRALQRAATNSASSIRSTLGLLLVPSLLILSVFFS

SEQ ID NO: 121 - protein, 225 aa, Human poliovirus 2
MALQLFNPEDYYDILFPGVNAFVNNIHYLDPRHWGPSLFSTISQAFWNLVRDDLPALTSQEIQRRTQKLFVESLARFLEETTWAIVNSPANLYNYISDYYSRLSPVRPSMVRQVAQREGTYISFGHSYTQSIDDADSIQEVTQRLDLKTPNVQSGEFIERSIAPGGANQRSAPQWMLPLLLGLYGTVTPALEAYEDGPNKKKRRKEGPRASSKTSYKRRSRSSRS

SEQ ID NO: 122 - protein, 344 aa, Human poliovirus 2
MGAALALLGDLVATVSEAAAATGFSVAEIAAGEAAATIEVEIASLATVEGITSTSEAIAAIGLTPETYAVITGAPGAVAGFAALVQTVTGGSAIAQLGYRFFADWDHKVSTVGLFQQPAMALQLFNPEDYYDILFPGVNAFVNNIHYLDPRHWGPSLFSTISQAFWNLVRDDLPALTSQEIQRRTQKLFVESLARFLEETTWAIVNSPANLYNYISDYYSRLSPVRPSMVRQVAQREGTYISFGHSYTQSIDDADSIQEVTQRLDLKTPNVQSGEFIERSIAPGGANQRSAPQWMLPLLLGLYGTVTPALEAYEDGPNKKKRRKEGPRASSKTSYKRRSRSSRS

SEQ ID NO: 123 - protein, 354 aa, Human poliovirus 2
MAPTKRKGERKDPVQVPKLLIRGGVEVLEVKTGVDSITEVECFLTPEMGDPDEHLRGFSKSISISDTFESDSPNRDMLPCYSVARIPLPNLNEDLTCGNILMWEAVTLKTEVIGVTSLMNVHSNGQATHDNGAGKPVQGTSFHFFSVGGEALELQGVLFNYRTKYPDGTIFPKNATVQSQVMNTEHKAYLDKNKAYPVECWVPDPTRNENTRYFGTLTGGENVPPVLHITNTATTVLLDEFGVGPLCKGDNLYLSAVDVCGMFTNRSGSQQWRGLSRYFKVQLRKRRVKNPYPISFLLTDLINRRTPRVDGQPMYGMDAQVEEVRVFEGTEELPGDPDMMRYVDKYGQLQTKML

SEQ ID NO: 124 - protein, 3119 aa, Plasmodium falciparum
MGNAIPATPDPIFINESYKSARNVLENVARLIKAKATKDVKRHRNVLKGNLRNAKFYHPFSKERPYYKSACDLDYRFHSNIWSGDNTYRHPCAGRNRNRFSYEGEAECRISRITGNKTEHGACAPYRRRHLCDYIFHQVNDNYIKTSDDLLGNLLVTAKYEGESIVNSYANSGMFNVCTALARSFADIGDIIRGKDLYLGNGDYKEKVSNNLRAIFNKIYENLNDPKLKKHYQKDAPNYYKLRDDWWNANREDVWKALTCNAPYEAQYFIKPSDKEHSFSSEYCGHYKNGDPLTNLDYVPQFLRWFEEWAEEFCRIKKIKLENVKNACRDEKKRKYCSLNGFDCTQTIWKKKVFGRGNDCTNCSFKCFPYEIWLGNQREAFRKQKEKYAKEIEAYVTNRGIPKSSINNGYYKDFYNKLKEKTYNTVDEFINLLNEGRYCKKQKPEEENIDFIKTGEKGTFYRSDYCQVCPDCGVDCSSGTCIEKKDDINCGKKINYEPPHGVKPIDIIVLYSGNEEGEITKRLSEFCTDSSNNKGKNYEQWKCYYKNGDDNKCKMVKNSGNNITEEKIISFDEFFYVWVRKLLIDSIKWENELNNCIDNTSTHCNKECNKNCECFDKWVKKKEDEWKNVKNVFENKNGTSHNYYNKLNGLFKGFFFEVMDKLNKDETKWNKLIESLRTKIDSSKENIGTGNTQDTIKVLLDHLKETATICKDNNTNEACETSRNRKTNPCAKPHGKKLATVKQIAQYYKRKAYIQLNERGSRSALKGDASQGQYDRGGKADDFKTKLCEINEKHSNARSNSLNPCNGKDNNKVRFNVGTPWQSGEKIATATDVYLPPRRQHFCTSNLEYLINGGHQAILNVKNGKINHSFLGDVLLAAKYQAQHTMKDYKSKNDKEGICRAIRYSFADIGDIIKGTDLWDKDGGEIKTQNHLVTIFDKIKAQLPKDIKGKYTGTKHLELRKDWWEANRDQVWKAMQCGNDNPCSGESDHTPLHDYIPQRLRWMTEWAEWYCKEQSRLYDKLKVCEECMRKGESCTKGSGECATCKEACEEYNKEIKKWEQQWDAISYKYLMLYAKARITAINGGPGYYNTEVQEEDKPVVDFLYNLYLQNGGKKGPPPDTHRVKALIARVKRDAARNRVKRADGSSATRVTATTTITPYSTAAGYIHQEAHIGDCQKQTQFCKNKNGSDVSDTEADPTYAFRDKPHDHDTACKCKDRQPELVTEKKKDDEGEEQEDEPPKPKPPSTPNPCVRKDQSGTHIVSVEDVAQGMQRETHDRVTKVPGLTADAKLGQYYQNGKVNTLNNECDISLEHSNRNTSRSQRPCYGKDGYDKMFKIENGWKSGTDINKKHPHDVFLPPRREHFCTSNLEHLNTNVSGLTGPNAIHSLLGDVLLAAKKEAGFIEEKYKKPITPEGFKENVTMCRAIKYSFADLGDIIKGTDLWDGNGGEKNTQSNLETIFGKIKDNLGKSVENYKDDSYPYIKLRSDWWSANRDKVWKAMTCPQNGIKCDKDPPLDDYIPQRLRWMTEWAEWYCKYQAEAYKTLQKGCDECKNKSKKCEKDKPQCKNCTKACDEYWKKIEKWENQWTKIKEKYEQLYQKAEKNDGDTSSGTDDVKEENDVVAFLSQLYEKNKGSNTIYSTAAGYIHQEAHIGDCKEQHVFCDKKNGDKPTNGEEKVDNEKYAFKHPPHEYEVACKCETNKKPEAPPPPPPPQPPPPPPQPARPAEDQIEHDHRARSDGGQRQRPLPLPPVQQPPVQQPPVQQPPAQPPQQPPQQPPQPPPPAPEGGGLGRSLPRADRNGEITDSEEEEEEEKETPKVDEETVEEETTKEEEKAPQDQEAENPDTKVEDKVEGSGPKEGEAPPKVDGVKPACDIVATLFNDTNKFKDACTLKYGPKAPTSWKCVPTTSGGSGVTTTAGSSVTTTPPSNSGAICVPPRRRRLYVKDLEKIGDGEVTQVQLRDAFIKCAAIETFFSWHKFKKDKEKKKKPQQQHALHPLFVQDDDEEEEEEEQENPQEQLKRGKIPDDFLHQMFYTFGDYKDILFGKDMGNDVGDVENNINKILPNNSAKSANGHSRQEWWKKYAEDIWKGMVCALSHSVSASDKDSMQKNLTDKYKYKEVKFTSKSSKHNIPLSEFEKKPQFIRWFEEWTEDFCRKRTYKLKKAKQECRGKEEGDKYCDGDGYDCTDKDKLRNKSFIYLQCSGCQKECIKYKKWIVNKRNEFNKQKKKFENEIKTVNGTNEDKYDEEVYKNPKLMYPLFNDFVSKLNESPYCINSNVEDKIDFNKNGETFGSSQYCKACPVYGVNCKNSKHKCLPISIEKYNSTKSSRGENNDDKTPSIIEVLMLDRKGDNKNNVFINDCKNAGFFEDASFQKWNCQKKNGVDQCKLTEFDDNMDDDKEMEFNVFFQRWLRYFVYDYNILKDKIKACVITKDEKSNKCINGCKGKLECVEKWLNKKSTEWGDIKEHYKKNPKFVNESIPYLVKSYFDQIYFDKDSTKAKEVVEEETERIKLWGCTGPNNCNEQEQSKNEDFITNLIEKLKNKIDICKAQPDGPDENCLPFPSDPEPEPEEDPDTSITSSPPDFCKNLNTPDGEKSPIDTEESAVPVDHDVTKEEEEEKEEEKDKGDEEEEEEEEEEDEEEEEEAEEEELDDEIHDDDSDSKTEDEDQDELDPAGPLSPSEPRPKRLSREFPSTQLKNAMLFSTILWMVGIGFAAFTYFFLKKKPKSPVDLLRVLDIHKGDYGTPTSKSSNRYIPYVSDRYKGKTYIYMEGDTSGDDDKYMFLSDTTDVTSSESEYEELDINDIYVPGSPKYKTLIEVVLEPSKRDIPSDDIPSSDTPMNKFTDEEWNELKQDFVSQYIQSEPLDVPQYDVSTELPMNIVGNVLDDGMDEKPFITSIHDRNLYSGDEISYNINMSTNTNNDIPKYVSNNVYSGIDLINDTLSGNQHIDIYDELLKRKENELFGTNYKKNTSNNNVAKLTNSDSIMNQLDLLHKWLDRHRDMCEKWNTKEELLDKLNEEWNKEKDGGNVPSDSNKRLNTDVSIQIDMDDGKPKKEFSNMDTILDDMEHDIYYDVNDENPSVNDIPMDHNKVDVPKKVHVEMKILNNTSNGSLEPEFPISDVWNI

SEQ ID NO: 125 - protein, 2980 aa, Toxoplasma gondii
MVATTLHSLPSRYLYTLLMSFLFVCGALALHESPDGLPEAPDRPQNAESGDGPPTLVLTLDPEYAGKSEEFAFTAEYFPPTESSKNEDGAQQSFVETPNRRLPGTFDPMSSSDVRSEVQLRVTTQQMERGLLAEIVVLQEGQMVSGFRASLQTKEQAALLHRLADLTNDPNIHFRVEWRGRGDGTGGLYIRTAVHLLATAYKPSVHFKLNLHQTGARGARETIKLLSSVPIDDLNAPGVDIGTLKQLIVDHAEPENILTGPGSFSIKRMFKESDPKNANTQEATLVPWLLRLLDLASPVTIVGDLTRNREFSTVLPQGPANWNDLLLLYTGMGDAANRGQNAPDFAQREPGYRPGSIFLSPDGFRGAAHLGDHQPDRLKQFWRQGGETGLNPGDIEHYYSPLFGRSYDTSNNPLLILDMYGNPVYSEGGVPKFIVGPGENDLTKLPDHVSGMVLPSVSARFLFPDKRSFTEFINPARPWNDISKGWKALMAKHKMKFNYREPGLVGVSVNGNWYGLTSEFIQTYPTLLHLLGSLAQSTPGFSLEDVTLHFDDKLPPKLPTLFVLDDAHDRQIPWCAFEFVIPLSPRGTVNIKSLLAKGKSAAESPKGCNFREKGFHFTTVHRWGFVESRNPLSIQWHGVLDYTGSKQECALLGNVLKDAHLAGRQIAVSFHAEHKATVIPVIETFGPDGELLKSKPQKPVTATVQFGDDLPGLLYDFHKPFQKKKVPTVVYPFLQGQGQGSRDALNGGVLGEEYYHRPRKTKITMRPEIPILNTHDTFVDGSGPHPNVPHFVIPLTAGPQQHLAPLKALRQWLRKEYPGSQLPFKLDRMSDEDLLGIADHLVFRFPDGTEATLRSIFGPEVFSPNWATMNPDAYQKLMDVLTRPKKVYLAKNFRIVVTDVDGQQIPFDIQIEPGDTWAKTLDDFFKAHPNLKPANVKLVLYDDKDTALRQFDINLDMYASPYTEAVDQQHMKGLQITLETPAPIVSCYQADPARPGQCLAVDMKRIFCGRVNPAKMVSRAWNEECTAAWIARADLGEVEDRYLMGPDDVRARSIRDLLTSAKNALKQRNPEKAKHLNIPVADVTESEELNRKMRERTELAMKSGKTLEDLDRLRHLKFEIRTLQRQGELQWAKLVGATITTTEKGKPAERHIRLDPKKFFLNDKLWKVFKELAAQVPGLKFENVFNFSFEVMNKEAREQWKKEQTTVTKEAKKQMRSQKTVVDVIFVGPDGSALFRDIGVELRQLSDEALGRLSKGDKRGLINQLAKRYDIPRQYFIRRGGFPSAAVNGTKWVITAMLGLVGGAGKKGLASLLKDPHAFVTHLQSAGGFSPTDTVKLVFDNGSVLDVPLSQLPDQDLGSLAEIYFPWKKTAGQAQEEKKKAVESKVAEGSGIMRKLEVTVMQPSLWPEVFGAWLSDLHEMDLFDDGPILLQVRPEGAQKGQVIRCSVKTLGELYQALNKPEIIRSKCPGMADLKKPFTFELSIRTPAEQYYKLYNRSRSPEDQRRTAAVLLKLKDHIRNLPDDGQVIFEYRKIKRTLTPQELQQLKALIEGLQPNENTDDVLTKILRLLGISDQDIAKSGRLRFGIKQAPTSSEQQMLREGSITAVVEDFQGGRRKATVRISIPEEEPLRLGASAQNYQVHMSLFSKNAQHLNTPCGSKSGAEVAKATWGQLCRWCNLKLADLPGLGHPTLYIRIISNEKTQTVRGGQPVTTNVDGHPVVYDIRMPGDPRSASGMPKSVFWNLVERPGSNELGPVWHQSIPKADGGLRKDYSYFDPNPGAWDPTLFGPSSGTFPQNTRAGIDIVTNPEAMETGDAYAPPIRFGFGFRNWNDRDAVKPQFNNMVSGIAPQERDLYKVYIQIPKGDGNYYPCSGVDINLFMQLTKEQIARACGIHPSLLEAPFGVYLLKETPTYARAQPSFPLFFVDGEGQEHPSLGHWTDAPAKFFSPHLRGASPNSLIQLEFAPGVTCNLTQQELMSLHTWEALLKRCNIDAGKERPATITTRIVPMFSTPNVTVKVPNELLQPLLRQHRGISPDQLFRQKPLEEVVALLLSNAHLGLYHVGLKYIDGTDQPYSECPEHLRQLPPSQIPGLQHIYIVPASEGEGDFPGVFRGGTLGDMMKGMNLSPQTTYGDFVRTVKKKINSPEGLTIPGVRQHVGGSGRPAQQIIDFDFAGPESPPGAAGKPGWEATWRPATVGAFPDNMPIGDIDREMHHPFLVFTTGHPPKYDLNGLAAYGGQPFREETTHLDASLRNLVEWMKDSLGISDPNGILAEIVIDTIRCPFPLSAAQLISATIGHLLHHCQVNDLEMSHSIYVTPTPVPGYTATPKRNGPQIVINGHNYGAPGTAPRDFGQLFNLPGRPGARPLNQDLEVSFSPLPGKPPVRGVLPGDVLPLLQSISDKHGQPGVAVVLNFLRQLHALAELPPGATLNIDTKLIPSQSPQQLYAPDQVPQPGPWIAGPTGGGRFPGGGVVVNESGGRRGPGGSAAVKFMPSTLRLPLLRQPSVELPRNSMLRGSIGGVGGLPRTEFVVPILPSQKSMPIEQVLKFFGIAPAAVQTLDVQEKPEQGAILIESGTVTFVPLKGPTFTVSMKKINATDKNTLATLLKAAGRSIIDLVGASDGTQPLVLKIVVDHGAVSPTKVTTPVGTPSHARSAMEGLTIWNLLPPLIDVHSVKTITIRVQAAKAFQQAAKAAAAAEGTEGDSAGEPLSRPKNVEPAVRTKFKNKIPELPAAFKPRQRTVSEINGAPNPKLVIFVEQDGQKTIRFTFPSRVNDVVIGQSTVSVVLDALLPNPGTWHRTFWGALSPDGTSCKPTMEFQYPHWLQTKMAELPVPNHSSCLLIREVSLNIKQRPNFFIKPYIFHSPLVIFALQGKQRIPIFEEQVDPAVTSQPLTALLEQLGIPKTQLDTILQCSSTNIDAPGECPSDSSTTVDPETVIPDAVATQSAFLVVTGKQKQAPGSFLQVLWRRQRRRNSIQKRITSH

SEQ ID NO: 126 - protein, 1702 aa, Toxoplasma gondii
MAEFTWRPLLMSLPKMIAFFHILLFSGALAAAAGSPAADLVASVQTVSNERKDLYARDTQPTARTGIDIGVSFTQQASGNARTFEIRQHGSGPPRPAPRRAAAVADDIFGSEDFSPPPMNVAGAPLRDMGVHFLECQATDGKIECTGQGAGARPPFFRGGVDPTEIHEIVQSRTVGPADYDEERPEQTPDYLSPTDVVTLQRFVSSANASNSPLLEDPVQVCLSRRKPTYTCHLLHEFAATSVIVEESGNLVCEDKAPLTVAEKRKINDAVKAGRTPQATGGQSSRPPNPTVSPSKAGAAPQNAASRQPVSFVEQENSEASMPTANTEQASATTEDTKIASAATDSGDYGEAAAGESAQEGDRPPPYNPDADEAGVPRAVQEAYEEARPLQEATIDKFKQDAAAAAEAADHFAQVSAFNAMQSALTKISAGYHLRAGSHVVLSACKRLVEAVAANPPGPGTVIPLEELRMQLVATLTQDFALAQAFIDYAIHIVHSAIETLTPQMVANALLELSGIEELINHTARVKSRLAARGQDSPANVRKEIVQESFRQLKVELFQEIVTRVCELMDDPESFLKTVPIIVGTTPTAPLRTGGHLGADYIIHLRNDLCDVTASDAQIFPSAPADEGLQGFPRHNLGERLVGWMDVMARTKTARKEVFKIIDFTKAKDVLLFASETWKARYATLQAPAAPAPSFYGITTSGCRNVNDIMKSKFFDMYLHQSGFMKLQRHGNDNSRQRFMHRVTLLQNDGILPQLPLEADYELMELNAAMQKNFVAANKSIFSRRAARHSKYGYLDLCDVACYQKIDRLHNDVMTNVFFSLDTTLMKIVAKVHRSYGIAKAFFQLGARQQHIADPNLGMWARRLFVHWASHNEVKQMQGQKVVKVNYENLRHGEFTLDTVRMRDALVRYTNMLKADPITRDLMSLVIHTWIHIRGVRNAAMGFKNSQKLNESMNASAIGAVFAKLWYESDISVVAPHQELKPFGAPLASMALQIGFFLHTVVEEYKMSLLEKAGAQIKSWFVGMFQKNKRRTVPRTWKAVVAATNRAPKVNLKAYQGALLVIKTLAKMFRERFLYRFYMQGQGSKVDFNTPTLLIHALVASWMDPSLDRLELSSRTIPNAKKLFWYYVWVNENGPSNAATRIVLTGCKKYTFLLPGVVRSVTSSTSEVVEAGSNILKIDKIILKRSSLEAYMNHLQATYDDPLTIVQVALDLAARCEGYSAAKDQPAQAMRGPARVRRATGESTTFTIRGGGVQGGTMSFVEAEADDERKEDSEDNTVDLSEQDQDSSFVQLKKLFNRRGSSAAGQAVQTDAQPLPKAVQTDAQPLPKVRRGGPDVDASAVILGSRFMLDLWCSKYRKMLVEKLSGISTKDATVMQQEISKVFSAVSSIKIAIPDYKDLWDFSLRCDWMDGYPDAEKMRAARAEMVTYAMAKASTGKRLKRMLQKVRSWIRKKAFAAARKLKSLKNRISTAFGRGKPPKAKVPDWAVVNAGMGMWTGKVFSTHLTFNEDEMSCNGPHEPIRVMSWKQNHFTTFASSSTNAERNYVLVKKGDDSHCWATREALVHKGWSGIPVYQYAEPAGFWLQEVSPSNQPFVVNWDGYLTTSDNLTLQDIDINASSDSLKSHAVMRIVDSNGKTIYQGPPTGVVQTQGGVVTLGSIRNLVSGVHSTGDSVEVRVTASGPQLTSVADLDTQFKEIPDLVLR

SEQ ID NO: 127 - protein, 578 aa, Toxoplasma gondii
MGHPTSFGQPSCLVWLAAAFLVLGLCLVQQGAGRQRPHQWKSSEAALSVSPAGDIVDKYSRDSTEGENTVSEGEAEGSRGGSWLEQEGVELRSPSQDSQTGTSTASPTGFRRLLRRLRFWRRGSTRGSDDAAEVSRRTRVPLHTRLLQHLRRVARIIRHGVSAAAGRLFGRVRQVEAERPQPVFTEGDPPDLETNSLYYRDKVPGQGIIQEILRQKPGIAHHPESFSVVAADERVSRTLWAEGGVVRVASELGQPGRVLVRGRRIGLFRPGMQFEATDQATGEPMTALVGHTVLEATARDVDSMRNEGLAVGLFQKVKNPYLANRYLRFLAPFDLVTIPGKPLVQKAKSRNEVGWVKNLLFLLPPTHVDMETFVDEIGRFPQEDRPLADAARLYLTVQAVRLVAHLQDEGVVHGKIMPDSFCLKREGGLYLRDFGSLVRAGAKVVVPAEYDEYTPPEGRAAARSRFGSGATTMTYAFDAWTLGSVIFLIWCSRAPDTKSGYEYSVEFFFSRCRRVPENVKLLVYKLINPSVEARLLALQAIETPEYREMEEQLSAASRLYSGDGTLTGGDDDMPPLET

SEQ ID NO: 128 - protein, 1479 aa, Toxoplasma gondii
MTKRAGLPLGRAFLVLILLSAADSLFFSSFPRSALQLFSSVLFTDAAEPDSDATPGLRPQPSPRTFRPTGYQRIEVKTVDEELPEDLKVYTASTRGSSSRTFEVRNAGGRQEGFTLSVLTAGGPLPHGSWSWSGTPPEVQTTGGSQISFGWVPDTETPSLPERNLLQLKRMLRDEGLIEAVQLRAAEKGCPVAVLHNLRQLPVNFREVLHEEYESRSNPAKMYEVANSYVQQRGSDAARWSVSQSVELSLLEMHATSTTDPRGSSAVPSFLETGPQVRVAMTDAVPSGIRVYATPPAPRPVPVQSNQTEKERSPTSKRLVGMQLGLYLICKLAALFGHPTLFLNPYYTEQQLLEAVAQALGIAPPHRGDFENEGNEAQATANQHNGSADQLLAAIEIFRLGPNPYTIGHVLTLMIAYLDYESFFGASPSKPFHSWVSLAASAGNNTGFAMLDEMCDNHRGPKRRGQKHWYQTGGARKHKNRDMLPLHRQLCDALELVLNGVQQIQIDLMDELGKYKTGVEPLVDPATNSARIHTRTCRGLSPVCDYEATILAPVRALEPHEQQDSLRTKKAFNLVTGYGSGHVGQITGSIAEPFSHSWRTRWGKVVADPTAYGEIFERTLWFDDRELMAKSSGALFRQYDRIAKDSMSFGVFMNVENGLLKKDMRSKLEAYISQRKSFVEKRQQSRFAKLRKKIPENDPYALRAAIFLALNSRTFCAQPTSFLSSFRTFLTNQYHKLSQGRNLPRSQRSLMAFMRTGQVKFFQEWCSFDPLAVNALFLFRFAVSGTDPAALHDRQHTRVSRNKKTMRILNSKWTPAVLKKLMRKVNHKHMAREAKALLLRSLDPTVLSSIVTAFDFITHTQANLEVNQNAFMYHEVRAREVSRQSAAEKGSHRLHERGLVRETDDMIKRWAEHGIPGDIKRRLARGEKLPEGMSFGGIPIPNLTNWDAQLNSKWLEAYNAYLRHPYGRAALNARDPVALLVKDSRDRLQAEAEGTIFLGRIAKRVHQSKNLLRRAGRALKTFFLSLLRENERSEYAVWFGVKVDMRQVIQTCRQINSVAEVVKNDRLYDFITDGWMELVKDVVAGYTKASVRVPGFDTISAANEQLRKEGVAAATARNQGFLSIHYDYANLPEEERKKEFQRSMCMEQCEALWKLVMAFVMPNLQNPKKLKGYEKDFSGAKEIEKLNSPHHVNAFRFSLSVQIDFFDNMLDKTSKKNLKAMKFGASTWFTYAMKLAGQVNSEMGNPNLGTALYMQAAYYGNYIRKWMEQRRKSRKQAIIGVLTLGMMGLYALLNVADIVQHMEDIGGAPPVSCVTNEILGVTCAPQAIAKATTSAARVATQDFLKVGLFAGMAPYLMLPMAVVSVWNILKSEIKVLLQFEMALKHTFTRLKRWLAAPFKNWWAKRGRLKDALFRRASQTYRKTEQETKQPPRPRNLHNPSSWGDTELDSLGVPPEPFVQDFEIKYTTPVFPMSAPLIKA

SEQ ID NO: 129 - protein, 288 aa, Shigella flexneri
MNLDGVRPYCRTVNKKNESISDIAFAHIIKRVKNSSCTHPKAALVFLGEKGFCDSNDVLSIMGQQIPRVFKNKMLYDYVFKNEKSKNDFLKMAESWLPQSEPIVINNDDDALNAAAYFSVKKAKIKTVNDTDFKEYNKVYILGHGSPGSHQLGLGSELIDVQTIISRMKDCGILNVKDIRFTSCGSADKVAPKNFNNAPAESLSCILNSLPFFKEKESLLEQIKKHLENDESLSDGLKISGYHGYGVHYGQELFPYSHYRSTSIPADPEHTVKRSSQKKTFIINKELD

SEQ ID NO: 130 - protein, 296 aa, Borrelia burgdorferi; identical to SEQ ID NO: 2

SEQ ID NO: 131 - protein, 274 aa, Borrelia burgdorferi
MKKYLLGIGLILALIACKQNVSSLDEKNSVSVDLPGGMTVLVSKEKDKDGKYSLDATVDKLELKGTSDKNNGSGTLEGEKTDKSKVKLTIADDLSQTKFEIFKEDGKTLVSKKVTLKDKSSTEEKFNEKGETSEKTIVRANGTRLEYTDIKSDGSGKAKEVLKDFTLEGTLAADGKTTLKVTEGTVVLSKNILKSGEITVALDDSDTTQATKKTGNWDSKSSTLTISVNSQKTKNLVFTKEDTITVQKYDSAGTNLEGKAVEITTLKELKAALK

SEQ ID NO: 132 - protein, 676 aa, Ebola virus
MGVTGILQLPRDRFKRTSFFLWVIILFQRTFSIPLGVIHNSTLQVSDVDKLVCRDKLSSTNQLRSVGLNLEGNGVATDVPSATKRWGFRSGVPPKVVNYEAGEWAENCYNLEIKKPDGSECLPAAPDGIRGFPRCRYVHKVSGTGPCAGDFAFHKEGAFFLYDRLASTVIYRGTTFAEGVVAFLILPQAKKDFFSSHPLREPVNATEDPSSGYYSTTIRYQATGFGTNETEYLFEVDNLTYVQLESRFTPQFLLQLNETIYTSGKRSNTTGKLIWKVNPEIDTTIGEWAFWETKKNLTRKIRSEELSFTVVSNGAKNISGQSPARTSSDPGTNTTTEDHKIMASENSSAMVQVHSQGREAAVSHLTTLATISTSPQSLTTKPGPDNSTHNTPVYKLDISEATQVEQHHRRTDNDSTASDTPSATTAAGPPKAENTNTSKSTDFLDPATTTSPQNHSETAGNNNTHHQDTGEESASSGKLGLITNTIAGVAGLITGGRRTRREAIVNAQPKCNPNLHYWTTQDEGAAIGLAWIPYFGPAAEGIYIEGLMHNQDGLICGLRQLANETTQALQLFLRATTELRTFSILNRKAIDFLLQRWGGTCHILGPDCCIEPHDWTKNITDKIDQIIHDFVDKTLPDQGDNDNWWTGWRQWIPAGIGVTGVIIAVIALFCICKFVF

SEQ ID NO: 133 - protein, 1356 aa, Human coronavirus
MKLFLILLVLPLASCFFTCNSNANLSMLQLGVPDNSSTIVTGLLPTHWFCANQSTSVYSANGFFYIDVGNHRSAFALHTGYYDANQYYIYVTNEIGLNASVTLKICKFSRNTTFDFLSNASSSFDCIVNLLFTEQLGAPLGITISGETVRLHLYNVTRTFYVPAAYKLTKLSVKCYFNYSCVFSVVNATVTVNVTTHNGRVVNYTVCDDCNGYTDNIFSVQQDGRIPNGFPFNNWFLLTNGSTLVDGVSRLYQPLRLTCLWPVPGLKSSTGFVYFNATGSDVNCNGYQHNSVVDVMRYNLNFSANSLDNLKSGVIVFKTLQYDVLFYCSNSSSGVLDTTIPFGPSSQPYYCFINSTINTTHVSTFVGILPPTVREIVVARTGQFYINGFKYFDLGFIEAVNFNVTTASATDFWTVAFATFVDVLVNVSATNIQNLLYCDSPFEKLQCEHLQFGLQDGFYSANFLDDNVLPETYVALPIYYQHTDINFTATASFGGSCYVCKPHQVNISLNGNTSVCVRTSHFSIRYIYNRVKSGSPGDSSWHIYLKSGTCPFSFSKLNNFQKFKTICFSTVEVPGSCNFPLEATWHYTSYTIVGALYVTWSEGNSITGVPYPVSGIREFSNLVLNNCTKYNIYDYVGTGIIRSSNQSLAGGITYVSNSGNLLGFKNVSTGNIFIVTPCNQPDQVAVYQQSIIGAMTAVNESRYGLQNLLQLPNFYYVSNGGNNCTTAVMTYSNFGICADGSLIPVRPRNSSDNGISAIITANLSIPSNWTTSVQVEYLQITSTPIVVDCATYVCNGNPRCKNLLKQYTSACKTIEDALRLSAHLETNDVSSMLTFDSNAFSLANVTSFGDYNLSSVLPQRNIRSSRIAGRSALEDLLFSKVVTSGLGTVDVDYKSCTKGLSIADLACAQYYNGIMVLPGVADAERMAMYTGSLIGGMVLGGLTSAAAIPFSLALQARLNYVALQTDVLQENQKILAASFNKAINNIVASFSSVNDAITQTAEAIHTVTIALNKIQDVVNQQGSALNHLTSQLRHNFQAISNSIQAIYDRLDSIQADQQVDRLITGRLAALNAFVSQVLNKYTEVRGSRRLAQQKINECVKSQSNRYGFCGNGTHIFSIVNSAPDGLLFLHTVLLPTDYKNVKAWSGICVDGIYGYVLRQPNLVLYSDNGVFRVTSRVMFQPRLPVLSDFVQIYNCNVTFVNISRVELHTVIPDYVDVNKTLQEFAQNLPKYVKPNFDLTPFNLTYLNLSSELKQLEAKTASLFQTTVELQGLIDQINSTYVDLKLLNRFENYIKWPWWVWLIISVVFVVLLSLLVFCCLSTGCCGCCNCLTSSMRGCCDCGSTKLPYYEFEKVHVQ

SEQ ID NO: 134 - protein, 1173 aa, Human coronavirus
MFVLLVAYALLHIAGCQTTNGLNTSYSVCNGCVGYSENVFAVESGGYIPSDFAFNNWFLLTNTSSVVDGVVRSFQPLLLNCLWSVSGLRFTTGFVYFNGTGRGDCKGFSSDVLSDVIRYNLNFEENLRRGTILFKTSYGVVVFYCTNNTLVSGDAHIPFGTVLGNFYCFVNTTIGNETTSAFVGALPKTVREFVISRTGHFYINGYRYFTLGNVEAVNFNVTTAETTDFCTVALASYADVLVNVSQTSIANIIYCNSVINRLRCDQLSFDVPDGFYSTSPIQSVELPVSIVSLPVYHKHTFIVLYVDFKPQSGGGKCFNCYPAGVNITLANFNETKGPLCVDTSHFTTKYVAVYANVGRWSASINTGNCPFSFGKVNNFVKFGSVCFSLKDIPGGCAMPIVANWAYSKYYTIGSLYVSWSDGDGITGVPQPVEGVSSFMNVTLDKCTKYNIYDVSGVGVIRVSNDTFLNGITYTSTSGNLLGFKDVTKGTIYSITPCNPPDQLVVYQQAVVGAMLSENFTSYGFSNVVELPKFFYASNGTYNCTDAVLTYSSFGVCADGSIIAVQPRNVSYDSVSAIVTANLSIPSNWTTSVQVEYLQITSTPIVVDCSTYVCNGNVRCVELLKQYTSACKTIEDALRNSARLESADVSEMLTFDKKAFTLANVSSFGDYNLSSVIPSLPTSGSRVAGRSAIEDILFSKLVTSGLGTVDADYKKCTKGLSIADLACAQYYNGIMVLPGVADAERMAMYTGSLIGGIALGGLTSAVSIPFSLAIQARLNYVALQTDVLQENQKILAASFNKAMTNIVDAFTGVNDAITQTSQALQTVATALNKIQDVVNQQGNSLNHLTSQLRQNFQAISSSIQAIYDRLDTIQADQQVDRLITGRLAALNVFVSHTLTKYTEVRASRQLAQQKVNECVKSQSKRYGFCGNGTHIFSIVNAAPEGLVFLHTVLLPTQYKDVEAWSGLCVDGTNGYVLRQPNLALYKEGNYYRITSRIMFEPRIPTMADFVQIENCNVTFVNISRSELQTIVPEYIDVNKTLQELSYKLPNYTVPDLVVEQYNQTILNLTSEISTLENKSAELNYTVQKLQTLIDNINSTLVDLKWLNRVETYIKWPWWVWLCISVVLIFVVSMLLLCCCSTGCCGFFSCFASSIRGCCESTKLPYYDVEKIHIQ

SEQ ID NO: 135 - protein, 1356 aa, Human coronavirus
MLLIIFILPTTLAVIGDFNCTNFAINDLNTTVPRISEYVVDVSYGLGTYYILDRVYLNTTILFTGYFPKSGANFRDLSLKGTTYLSTLWYQKPFLSDFNNGIFSRVKNTKLYVNKTLYSEFSTIVIGSVFINNSYTIVVQPHNGVLEITACQYTMCEYPHTICKSKGSSRNESWHFDKSEPLCLFKKNFTYNVSTDWLYFHFYQERGTFYAYYADSGMPTTFLFSLYLGTLLSHYYVLPLTCNAISSNTDNETLQYWVTPLSKRQYLLKFDNRGVITNAVDCSSSFFSEIQCKTKSLLPNTGVYDLSGFTVKPVATVHRRIPDLPDCDIDKWLNNFNVPSPLNWERKIFSNCNFNLSTLLRLVHTDSFSCNNFDESKIYGSCFKSIVLDKFAIPNSRRSDLQLGSSGFLQSSNYKIDTTSSSCQLYYSLPAINVTINNYNPSSWNRRYGFNNFNLSSHSVVYSRYCFSVNNTFCPCAKPSFASSCKSHKPPSASCPIGTNYRSCESTTVLDHTDWCRCSCLPDPITAYDPRSCSQKKSLVGVGEHCAGFGVDEEKCGVLDGSYNVSCLCSTDAFLGWSYDTCVSNNRCNIFSNFILNGINSGTTCSNDLLQPNTEVFTDVCVDYDLYGITGQGIFKEVSAVYYNSWQNLLYDSNGNIIGFKDFVTNKTYNIFPCYAGRVSAAFHQNASSLALLYRNLKCSYVLNNISLTTQPYFDSYLGCVFNADNLTDYSVSSCALRMGSGFCVDYNSPSSSSSRRKRRSISASYRFVTFEPFNVSFVNDSIESVGGLYEIKIPTNFTIVGQEEFIQTNSPKVTIDCSLFVCSNYAACHDLLSEYGTFCDNINSILDEVNGLLDTTQLHVADTLMQGVTLSSNLNTNLHFDVDNINFKSLVGCLGPHCGSSSRSFFEDLLFDKVKLSDVGFVEAYNNCTGGSEIRDLLCVQSFNGIKVLPPILSESQISGYTTAATVAAMFPPWSAAAGIPFSLNVQYRINGLGVTMDVLNKNQKLIATAFNNALLSIQNGFSATNSALAKIQSVVNSNAQALNSLLQQLFNKFGAISSSLQEILSRLDALEAQVQIDRLINGRLTALNAYVSQQLSDISLVKFGAALAMEKVNECVKSQSPRINFCGNGNHILSLVQNAPYGLLFMHFSYKPISFKTVLVSPGLCISGDVGIAPKQGYFIKHNDHWMFTGSSYYYPEPISDKNVVFMNTCSVNFTKAPLVYLNHSVPKLSDFESELSHWFKNQTSIAPNLTLNLHTINATFLDLYYEMNLIQESIKSLNNSYINLKDIGTYEMYVKWPWYVWLLISFSFIIFLVLLFFICCCTGCGSACFSKCHNCCDEYGGHHDFVIKTSHDD

SEQ ID NO: 136 - protein, 1353 aa, Human coronavirus
MFLILLISLPTAFAVIGDLKCTSDNINDKDTGPPPISTDTVDVTNGLGTYYVLDRVYLNTTLFLNGYYPTSGSTYRNMALKGSVLLSRLWFKPPFLSDFINGIFAKVKNTKVIKDRVMYSEFPAITIGSTFVNTSYSVVVQPRTINSTQDGDNKLQGLLEVSVCQYNMCEYPQTICHPNLGNHRKELWHLDTGVVSCLYKRNFTYDVNADYLYFHFYQEGGTFYAYFTDTGVVTKFLFNVYLGMALSHYYVMPLTCNSKLTLEYWVTPLTSRQYLLAFNQDGIIFNAEDCMSDFMSEIKCKTQSIAPPTGVYELNGYTVQPIADVYRRKPNLPNCNIEAWLNDKSVPSPLNWERKTFSNCNFNMSSLMSFIQADSFTCNNIDAAKIYGMCFSSITIDKFAIPNGRKVDLQLGNLGYLQSFNYRIDTTATSCQLYYNLPAANVSVSRFNPSTWNKRFGFIEDSVFKPRPAGVLTNHDVVYAQHCFKAPKNFCPCKLNGSCVGSGPGKNNGIGTCPAGTNYLTCDNLCTPDPITFTGTYKCPQTKSLVGIGEHCSGLAVKSDYCGGNSCTCRPQAFLGWSADSCLQGDKCNIFANFILHDVNSGLTCSTDLQKANTDIILGVCVNYDLYGILGQGIFVEVNATYYNSWQNLLYDSNGNLYGFRDYIINRTFMIRSCYSGRVSAAFHANSSEPALLFRNIKCNYVFNNSLTRQLQPINYFDSYLGCVVNAYNSTAISVQTCDLTVGSGYCVDYSKNRRSRGAITTGYRFTNFEPFTVNSVNDSLEPVGGLYEIQIPSEFTIGNMVEFIQTSSPKVTIDCAAFVCGDYAACKSQLVEYGSFCDNINAILTEVNELLDTTQLQVANSLMNGVTLSTKLKDGVNFNVDDINFSPVLGCLGSECSKASSRSAIEDLLFDKVKLSDVGFVEAYNNCTGGAEIRDLICVQSYKGIKVLPPLLSENQISGYTLAATSASLFPPWTAAAGVPFYLNVQYRINGLGVTMDVLSQNQKLIANAFNNALYAIQEGFDATNSALVKIQAVVNANAEALNNLLQQLSNRFGAISASLQEILSRLDALEAEAQIDRLINGRLTALNAYVSQQLSDSTLVKFSAAQAMEKVNECVKSQSSRINFCGNGNHIISLVQNAPYGLYFIHFSYVPTKYVTARVSPGLCIAGDRGIAPKSGYFVNVNNTWMYTGSGYYYPEPITENNVVVMSTCAVNYTKAPYVMLNTSIPNLPDFKEELDQWFKNQTSVAPDLSLDYINVTFLDLQVEMNRLQEAIKVLNQSYINLKDIGTYEYYVKWPWYVWLLICLAGVAMLVLLFFICCCTGCGTSCFKKCGGCCDDYTGYQELVIKTSHDD

SEQ ID NO: 137 - protein, 1255 aa, Human coronavirus
MFIFLLFLTLTSGSDLDRCTTFDDVQAPNYTQHTSSMRGVYYPDEIFRSDTLYLTQDLFLPFYSNVTGFHTINHTFGNPVIPFKDGIYFAATEKSNVVRGWVFGSTMNNKSQSVIIINNSTNVVIRACNFELCDNPFFAVSKPMGTQTHTMIFDNAFNCTFEYISDAFSLDVSEKSGNFKHLREFVFKNKDGFLYVYKGYQPIDVVRDLPSGFNTLKPIFKLPLGINITNFRAILTAFSPAQDIWGTSAAAYFVGYLKPTTFMLKYDENGTITDAVDCSQNPLAELKCSVKSFEIDKGIYQTSNFRVVPSGDVVRFPNITNLCPFGEVFNATKFPSVYAWERKKISNCVADYSVLYNSTFFSTFKCYGVSATKLNDLCFSNVYADSFVVKGDDVRQIAPGQTGVIADYNYKLPDDFMGCVLAWNTRNIDATSTGNYNYKYRYLRHGKLRPFERDISNVPFSPDGKPCTPPALNCYWPLNDYGFYTTTGIGYQPYRVVVLSFELLNAPATVCGPKLSTDLIKNQCVNFNFNGLTGTGVLTPSSKRFQPFQQFGRDVSDFTDSVRDPKTSEILDISPCSFGGVSVITPGTNASSEVAVLYQDVNCTDVSTAIHADQLTPAWRIYSTGNNVFQTQAGCLIGAEHVDTSYECDIPIGAGICASYHTVSLLRSTSQKSIVAYTMSLGADSSIAYSNNTIAIPTNFSISITTEVMPVSMAKTSVDCNMYICGDSTECANLLLQYGSFCTQLNRALSGIAAEQDRNTREVFAQVKQMYKTPTLKYFGGFNFSQILPDPLKPTKRSFIEDLLFNKVTLADAGFMKQYGECLGDINARDLICAQKFNGLTVLPPLLTDDMIAAYTAALVSGTATAGWTFGAGAALQIPFAMQMAYRFNGIGVTQNVLYENQKQIANQFNKAISQIQESLTTTSTALGKLQDVVNQNAQALNTLVKQLSSNFGAISSVLNDILSRLDKVEAEVQIDRLITGRLQSLQTYVTQQLIRAAEIRASANLAATKMSECVLGQSKRVDFCGKGYHLMSFPQAAPHGVVFLHVTYVPSQERNFTTAPAICHEGKAYFPREGVFVFNGTSWFITQRNFFSPQIITTDNTFVSGNCDVVIGIINNTVYDPLQPELDSFKEELDKYFKNHTSPDVDLGDISGINASVVNIQKEIDRLNEVAKNLNESLIDLQELGKYEQYIKWPWYVWLGFIAGLIAIVMVTILLCCMTSCCSCLKGACSCGSCCKFDEDDSEPVLKGVKLHYT

SEQ ID NO: 138 - protein, 842 aa, Human immunodeficiency virus type 1
MRVMGIQRSYPCWLKWGIIILGMIIICNTTDNLWVTVYYGVPVWKDAETTLFCASDAKAYETEKHNVWATHACVPTDPNPQEIDLENVIEEFNMWKNNMVEQMHTDIISLWDQSLKPCVKLTPLCVTLDCSNHKSINNKGVSMGEEVKNCSFNMTTELRDKKQKVYSLFYKLDVVPLDEANGNNNSSYRLVNCNTSAITQACPKVTFEPIPIHYCAPAGFAILKCKDKEFSGTGPCENVSTVQCTHGIKPVVTTQLLLNGSLAEEHVMIRSENITNNAKNILVQLNESVEIYCIRPSNNTRKSVRIGPGQTFYATGEIMGDIRQAHCNVSGSKWNKTLQQVADQLRKHFNTTTIIFDSPSGGDLEITTHSFNCGGEFFYCNTSGLFNSTWPSSTQELSDPITLSCRIKQIINMWQRVGQAMYAPPIQGEIRCNSSITGIILTRDGGYNSTNETFRPGGGDMRDNWRSELYKYKVVKIEPLGVAPTKARRRVVEREKRAVTMGAVFLGFLGAAGSTMGAASLTLTVQARLLLSGIVQQQSNLLRAIEAQQHLLKLTVWGIKQLQARVLAVERYLRDQQLLGIWGCSGKLICTTNVPWNSSWSNKSYSEIWDNMTWLQWDKEVSNYTDIIYKLLEDSQNQQEKNEQDLLALDKWANLWNWFGISNWLWYIKIFIMIVGGLIGLRIVFAVLSLVNRVRQGYSPLSFQTLIPVPRGPDRPEGTEEGGGEQDRNRSIRLVSGFLALAWDDLRSLCLFSYHRLRDLILIATRIVELLRHRGWEAIKYLWNLLLYWGRELKISAINLINTIAIVVAGWTDRVIELGQGIGRAILHIPRRIRQGLERSLL

SEQ ID NO: 139 - protein, 859 aa, Human immunodeficiency virus type 2
MAYFSSRLPIALLLIGISGFVCKQYVTVFYGIPAWRNATVPLICATTNRDTWGTVQCLPDNGDYTEIRLNITEAFDAWDNTVTQQAVDDVWRLFETSIKPCVKLTPLCVAMNCSKTETNPGNASSTTTTKPTTTSRGLKTINETDPCIKNDSCTGLGEEEIMQCNFSMTGLRRDELKQYKDTWYSEDLECNNTRKYTSRCYIRTCNTTIIQESCDKHYWDSLRFRYCAPPGFFLLRCNDTNYSGFMPNCSKVVASSCTRMMETQSSTWFGFNGTRAENRTYIYWHEKDNRTIISLNTYYNLSIHCKRPGNKTVVPIRTVSGLLFHSQPINKRPRQAWCWFKGNWTEAIKEVKRTIIKHPRYKGGAKNITSVKLVSEHGKGSDPETTYMWTNCRGEFLYCNMTWFLNWVENKTNTTRRNYAPCHIRQIINTWHKVGKNIYLPPREGELSCNSTVTSLIANINSDNSTTNISVSAEVSELYRLELGDYKLVEITPIGFAPTDVRRYSSVKPRNKRGVMVLGFLGFLAMAGSAMGATSLTLSAQSRTLLAGIVQQQQQPVDVVKRQQELLRLTVWGTKNLQARVTAIEKYLKDQAQLNSWGCAFRQVCHTTVPWPNETLTPNWNNMTWQQWEKQVHFLDANITALLEEAQIQQEKNMYELQKINSWDVFGNWFDLTSWIKYIHLGLYIVAGLVVLRIVVYIVQMLARLRKGYRPVFSSPPSYTQQIPIRKDRGQPANEETEEGGGNDGDYRSWPWQIEYIHFLLRQLRNLLIWLYNGCRTLLLKTFQILHQISTNLQPLRLPVAYLQYGISWFQEALRAAARATGETLASAGETLWEALRRAARAIIAIPRRIRQGLELTLL

SEQ ID NO: 140 - protein, 665 aa, Moloney murine sarcoma virus
MARSTLSKPLKNKVNPRGPLIPLILLMLRGVSTASPGSSPHQVYNITWEVTNGDRETVWATSGNHPLWTWWPDLTPDLCMLAHHGPSYWGLEYQSPFSSPPGPPCCSGGSSPGCSRDCEEPLTSLTPRCNTAWNRLKLDQTTHKSNEGFYVCPGPHRPRESKSCGGPDSFYCAYWGCETTGRAYWKPSSSWDFITVNNNLTSDQAVQVCKDNKWCNPLVIRFTDAGRRVTSWTTGHYWGLRLYVSGQDPGLTFGIRLRYQNLGPRVPIGPNPVLADQQPLSKPKPVKSPSVTKPPSGTPLSPTQLPPAGTENRLLNLVDGAYQALNLTSPDKTQECWLCLVAGPPYYEGVAVLGTYSNHTSAPANCSVASQHKLTLSEVTGQGLCIGAVPKTHQALCNTTQTSSRGSYYLVAPTGTMWACSTGLTPCISTTILNLTTDYCVLVELWPRVTYHSPSYVYGLFERSNRHKREPVSLTLALLLGGLTMGGIAAGIGTGTTALMATQQFQQLQAAVQDDLREVEKSISNLEKSLTSLSEVVLQNRRGLDLLFLKEGGLCAALKEECCFYADHTGLVRDSMAKLRERLNQRQKLFESTQGWFEGLFNRSPWFTTLISTIMGPLIVLLMILLFGPCILNRLVQFVKDRISVVQALVLTQQYHQLKPIEYEP

SEQ ID NO: 141 - protein, 669 aa, Murine leukemia virus
MESTTLSKPFKNQVNPWGPLIVLLILGGVNPVTLGNSPHQVFNLTWEVTNGDRETVWAITGNHPLWTWWPDLTPDLCMLALHGPSYWGLEYRAPFSPPPGPPCCSGSSDSTPGCSRDCEEPLTSYTPRCNTAWNRLKLSKVTHAHNGGFYVCPGPHRPRWARSCGGPESFYCASWGCETTGRASWKPSSSWDYITVSNNLTSDQATPVCKGNEWCNSLTIRFTSFGKQATSWVTGHWWGLRLYVSGHDPGLIFGIRLKITDSGPRVPIGPNPVLSDRRPPSRPRPTRSPPPSNSTPTETPLTLPEPPPAGVENRLLNLVKGAYQALNLTSPDKTQECWLCLVSGPPYYEGVAVLGTYSNHTSAPANCSVASQHKLTLSEVTGQGLCIGAVPKTHQVLCNTTQKTSDGSYYLAAPTGTTWACSTGLTPCISTTILDLTTDYCVLVELWPRVTYHSPSYVYHQFERRAKYKREPVSLTLALLLGGLTMGGIAAGVGTGTTALVATQQFQQLQAAMHDDLKEVEKSITNLEKSLTSLSEVVLQNRRGLDLLFLKEGGLCAALKEECCFYADHTGLVRDSMAKLRERLSQRQKLFESQQGWFEGLFNKSPWFTTLISTIMGPLIILLLILLFGPCILNRLVQFIKDRISVVQALVLTQQYHQLKTIEDCKSRE

SEQ ID NO: 142 - protein, 120 aa, Homo sapiens
MKVSVAALSCLMLVTALGSQARVTKDAETEFMMSKLPLENPVLLDRFHATSADCCISYTPRSIPCSLLESYFETNSECSKPGVIFLTKKGRRFCANPSDKQVQVCVRMLKLDTRIKTRKN

SEQ ID NO: 143 - protein, 261 aa, Mus musculus
MQPLLLLLTFILLQGDEAGKIIGGREARPHSYPYMAFLLIQSPEGLSACGGFLVREDFVLTAAHCLGSSINVTLGAHNIQMRERTQQLITVLRAIRHPDYNPQNIRNDIMLLQLRRRARRSGSVKPVALPQASKKLQPGDLCTVAGWGRVSQSRGTNVLQEVQLRVQMDQMCANRFQFYNSQTQICVGNPRERKSAFRGDSGGPLVCSNVAQGIVSYGSNNGNPPAVFTKIQSFMPWIKRTMRRFAPRYQRPANSLSQAQT

SEQ ID NO: 144 - protein, 223 aa, Mus musculus
MRVAGLIRVVVFIFTIVTMWVFLRSYTSFSRKTIRLPRWLGITPKDIQTPKSKCGLSKICPNNFFAFKISSGAANVVGPSMCFEDEIIMSPVRNNVGRGLNVALVNGSTGQVMKKDSFDMYSGDPQLLLNFLTEIPDSTLVLVASYDDPGTKMNDKIKTLFSNLGSSYAKQLGFRDSWVFVGAKDLKSKSPYEQFLKNNPETNKYDGWPELLELEGCVPRKVM

SEQ ID NO: 145 - protein, 96 aa, Mus musculus
MKIAITITVVMLSICCSSASSDICPGFLQVLEALLMESESGYVASLKPFNPGSDLQNAGTQLKRLVDTLPQETRINIMKLTEKILTSPLCKQDLRF

SEQ ID NO: 146 - protein, 149 aa, Staphylococcus aureus [sequence omitted]

SEQ ID NO: 147 - protein, 170 aa, Mus musculus
MEARSKPQFLAFLILFSVLFSQSLAWPLFGPPSVVRLDDRMPFEGAGDPDQVSLKADSDILQNPLAENGTPYYDVSRNARHADGVFTSDYSRLLGQISAKKYLESLIGKRISSSISEDPVPIKRHSDAVFTDNYTRLRKQMAVKKYLNSILNGKRSSEGDSADFLEELEK

SEQ ID NO: 148 - protein, 327 aa, Mus musculus; identical to SEQ ID NO: 8

SEQ ID NO: 149 - protein, 190 aa, Mus musculus
MLGMIRNSLFGSVETWPWQVLSTGGKEDVSYEERACEGGKFATVEVTDKPVDEALREAMPKIMKYVGGTNDKGVGMGMTVPVSFALFPNEDGSLQKKLKVWFRIPNQFQGSPPAPSDESVKIEEREGITVYSTQFGGYAKEADYVAHATQLRTTLEGTPATYQGDVYYCAGYDPPMKPYGRRNEVWLVKA

SEQ ID NO: 150 - protein, 122 aa, Mus musculus
MKLLTSLVFCSLLLGVCHGGFFSFIGEAFQGAGDMWRAYTDMKEAGWKDGDKYFHARGNYDAAQRGPGGVWAAEKISDARESFQEFFGRGHEDTMADQEANRHGRSGKDPNYYRPPGLPAKY

SEQ ID NO: 151 - protein, 140 aa, Mus musculus [sequence omitted]

SEQ ID NO: 152 - protein, 140 aa, Homo sapiens
MDVFMKGLSKAKEGVVAAAEKTKQGVAEAAGKTKEGVLYVGSKTKEGVVHGVATVAEKTKEQVTNVGGAVVTGVTAVAQKTVEGAGSIAAATGFVKKDQLGKNEEGAPQEGILEDMPVDPDNEAYEMPSEEGYQDYEPEA

SEQ ID NO: 153 - protein, 733 aa, Mus musculus
MADPRQEFDTMEDHAGDYTLLQDQEGDMDHGLKESPPQPPADDGAEEPGSETSDAKSTPTAEDVTAPLVDERAPDKQAAAQPHTEIPEGITAEEAGIGDTPNQEDQAAGHVTQGRREGQAPDLGTSDWTRQQVSSMSGAPLLPQGLREATCQPSGTRPEDIEKSHPASELLRRGPPQKEGWGQDRLGSEEEVDEDLTVDESSQDSPPSQASLTPGRAAPQAGSGSVCGETASVPGLPTEGSVPLPADFFSKVSAETQASQPEGPGTGPMEEGHEAAPEFTFHVEIKASTPKEQDLEGATVVGVPGEEQKAQTQGPSVGKGTKEASLQEPPGKQPAAGLPGRPVSRVPQLKARVASKDRTGNDEKKAKTSTPSCAKAPSHRPCLSPTRPTLGSSDPLIKPSSPAVSPEPATSPKHVSSVTPRNGSPGTKQMKLKGADGKTGAKIATPRGAASPAQKGTSNATRIPAKTTPSPKTPPGSGEPPKSGERSGYSSPGSPGTPGSRSRTPSLPTPPTREPKKVAVVRTPPKSPSASKSRLQTAPVPMPDLKNVRSKIGSTENLKHQPGGGKVQIINKKLDLSNVQSKCGSKDNIKHVPGGGSVQIVYKPVDLSKVTSKCGSLGNIHHKPGGGQVEVKSEKLDFKDRVQSKIGSLDNITHVPGGGNKKIETHKLTFRENAKAKTDHGAEIVYKSPVVSGDTSPRHLSNVSSTGSIDMVDSPQLATLADEVSASLAKQGL

SEQ ID NO: 154 - protein, 19 aa, Helicobacter pylori
AKKVFKRLEKLFSKIQNDK

SEQ ID NO: 155 - protein, 8 aa, Mus musculus
SIINFEKL

SEQ ID NO: 156 - protein, 11 aa, Mus musculus
GLYQAKRFKVG

SEQ ID NO: 157 - protein, 8 aa, Mus musculus
YQAKRFKV

SEQ ID NO: 158 - protein, 14 aa, Mycoplasma fermentans
CGNNDESNISFKEK

SEQ ID NO: 159 - protein, 12 aa, Ebola virus
NDNWWTGWRQWI

SEQ ID NO: 160 - protein, 36 aa, Human coronavirus
TVELQGLIDQINSTYVDLKLLNRFENYIKWPWWVWL

SEQ ID NO: 161 - protein, 36 aa, Human coronavirus
VQKLQTLIDNINSTLVDLKWLNRVETYIKWPWWVWL

SEQ ID NO: 162 - protein, 36 aa, Human coronavirus
MNLIQESIKSLNNSYINLKDIGTYEMYVKWPWYVWL

SEQ ID NO: 163 - protein, 36 aa, Human coronavirus
MNRLQEAIKVLNQSYINLKDIGTYEYYVKWPWYVWL

SEQ ID NO: 164 - protein, 36 aa, Human coronavirus
IDRLNEVAKNLNESLIDLQELGKYEQYIKWPWYVWL

SEQ ID NO: 165 - protein, 36 aa, Human immunodeficiency virus type 2; identical to SEQ ID NO: 164

SEQ ID NO: 166 - protein, 36 aa, Human immunodeficiency virus type 1
YTSLIHSLIEESQNQQEKNEQELLELDKWASLWNWF

SEQ ID NO: 167 - protein, 6 aa, Porcine rotavirus
LDLLFL

SEQ ID NO: 168 - protein, 21 aa, Artificial Sequence
  SYNTHESIZED
TIPMFVPESTSKLQKFTSWFM

SEQ ID NO: 169 - protein, 24 aa, Homo sapiens
MAPRGFSCLLLLTSEIDLPVKRRA

SEQ ID NO: 170 - protein, 38 aa, Rattus norvegicus
MAKRGFNCLLLSISEIDLPVKRLESPNKTRRPYGASIY

SEQ ID NO: 171 - protein, 15 aa, Staphylococcus aureus
FTFEPFPTNEEIESN

SEQ ID NO: 172 - protein, 28 aa, Mus musculus
HSDAVFTDNYTRLRKQMAVKKYLNSILN

SEQ ID NO: 173 - protein, 18 aa, Mus musculus
MLWRRKIGPQMTLSHAAG

SEQ ID NO: 174 - protein, 21 aa, Mus musculus
KTNMKHMAGAAAAGAVVGGLG

SEQ ID NO: 175 - protein, 12 aa, Mus musculus
MLWRRKIGPQMT

SEQ ID NO: 176 - protein, 37 aa, Mus musculus
LLGDFFRKSKEKIGKEFKRIVQRIKDFLRNLVPRTES

SEQ ID NO: 177 - DNA, 66 bp, Mus musculus
aacctccagagaggcaacgctagcatcatcaatttcgagaagctggccagacaagcagctaccgca

SEQ ID NO: 178 - protein, 60 aa, Porcine rotavirus
AACCTCCAGAGAGGCAACGCTCTGGACCTGCTGTTCCTGGCCAGACAAGCAGCTACCGCA

SEQ ID NO: 179 - DNA, 75 bp, Mus musculus
aacctccagagaggcaacgctggcctgtaccaggccaagagattcaaggtgggcgccagacaagcagctaccgca

SEQ ID NO: 180 - DNA, 66 bp, Mus musculus
aacctccagagaggcaacgcttaccaggccaagagattcaaggtggccagacaagcagctaccgca

SEQ ID NO: 181 - protein, 8 aa, Mus musculus
SIINFEKL

SEQ ID NO: 182 - protein, 11 aa, Mus musculus
GLYQAKRFKVG

SEQ ID NO: 183 - protein, 8 aa, Mus musculus
YQAKRFKV

What is claimed is:

1. A method for identifying from a population of engineered AAV capsid proteins, a capsid protein exhibiting preferential tropism to a desired cell type, the method comprising:
a. generating a plurality of recombinant AAV virions (rAAVs) each comprising an engineered capsid protein encapsidating an AAV vector, wherein the AAV vector has AAV inverted terminal repeats (ITRs) flanking a transgene and an identifier sequence unique to the capsid protein encapsidating the vector;
b. infecting a population of more than one cell type with the rAAVs of (a) to generate a plurality of transduced cells each comprising an rAAV from (a);
c. determining the sequence of the unique identifier sequence in each transduced cell from (b) to identify the capsid protein present in each cell;
d. determining the cell type of each transduced cell from (b); and
e. identifying a capsid protein exhibiting preferential tropism to the desired cell type based on the presence and absence of the protein in each cell type, wherein the protein exhibits preferential tropism to the desired cell type if the protein is present in the desired cell type and absent in cell types other than the desired cell type.

2. The method of claim 1, further comprising identifying a plurality of engineered AAV capsid proteins, each exhibiting preferential tropism to a desired cell type.

3. The method of claim 1, wherein determining the cell type of each cell comprises determining a transcriptional profile for each cell.

4. The method of claim 1, wherein the transgene encodes a reporter.

5. The method of claim 4, further comprising detecting the transgene in each cell in the population of cells to identify cells transduced with an rAAV.

6. The method of claim 1, wherein a cell of the desired cell type is a neural cell.

7. The method of claim 1, wherein a cell of the desired cell type is a cell of microglial lineage.

8. The method of claim 1, wherein the engineered protein comprises a peptide insertion.

9. The method of claim 8, wherein the peptide insertion is in a region of the capsid protein of AAV2 selected from I-261, I-381, I-447, I-534, I-573, I-587, I-453, I-520, I-588, I-584, I-585, I-588, I-46, I-115, I-120, I-139, I-161, I-312, I-319, I-459, I-496, I-657, Y257, N258, K259, S391, F392, Y393, C394, Y397, F398, Q536, Q539, or a corresponding position in a capsid protein of another AAV serotype.

10. The method of claim 1, wherein the engineered capsid protein is an AAV2 capsid protein comprising the Y444F, Y500F, Y730F, T491V, R585S, R588T, R487G amino acid substitutions, or combinations thereof, or corresponding substitutions in the capsid protein of another AAV serotype.

11. The method of claim 1, wherein the engineered capsid protein is an AAV2 capsid protein comprising the R585S, R588T, and R487G amino acid substitutions, or corresponding substitutions in the capsid protein of another AAV serotype.

12. A computerized system for identifying a rAAV exhibiting preferential tropism to a desired cell type, the computerized system comprising:
a. a general purpose computer having at least one processor;
b. computer readable memory storing a database of tropism properties exhibited by a plurality of engineered AAV capsid proteins identified using a method of claim 1; and
c. a computer readable medium comprising functional modules including instructions for the general purpose computer which when executed by the at least one processor, cause the at least one processor to query the database and select among the plurality of engineered AAV capsid proteins a capsid protein exhibiting preferential tropism to a desired cell type.

13. The computerized system of claim 12, wherein the database further comprises:
a. a plurality of cell-type-specific transcriptional profile information associated with each cell type; and
b. a plurality of nucleic acid sequences, each sequence encoding a unique engineered AAV capsid protein.

14. The computerized system of claim 13, wherein the database further comprises a plurality of identifier sequences, wherein each identifier is unique to a nucleic acid sequence encoding a unique engineered AAV capsid protein.

15. A plurality of recombinant AAV virions (rAAVs), wherein each rAAV member of the plurality of rAAVs comprises an engineered AAV capsid protein encapsidating an AAV vector, wherein the AAV vector has AAV inverted terminal repeats (ITRs) flanking a transgene and an identifier sequence unique to the capsid protein of each rAAV, wherein each engineered AAV capsid protein exhibits preferential tropism to a desired cell type.

16. The rAAV library of claim 15, wherein the engineered capsid protein comprises at least one mutation relative to a wild type capsid protein, and wherein the mutation is selected from a peptide insertion, an amino acid substitution, and an amino acid deletion.

17. The rAAV library of claim 16, wherein the desired cell type is a glial cell.

18. The rAAV library of claim 17, wherein each peptide insertion is derived from an amino acid sequence of SEQ ID NO 2-183.

19. The rAAV library of claim 15, wherein each rAAV exhibits preferential tropism to a desired target cell type.

20. A plurality of nucleic acid constructs encoding the plurality of rAAVs of claim 15.

21. A plurality of cells comprising the plurality of rAAVs of claim 15, the plurality of nucleic acid constructs encoding the plurality of rAAVs of claim 20, or a combination thereof.

22. A method of optimizing delivery of a transgene to a desired cell type in a population of more than one cell type, the method comprising:
a. identifying or having identified an engineered AAV capsid protein exhibiting preferential tropism to the desired cell type by the method of claim 1 or by the computerized system of claim 12; and
b. transducing a population of cells comprising the desired cell type with an rAAV comprising the engineered AAV capsid protein identified in (a) to thereby deliver the transgene to the desired cell type.

23. The method of claim 22, wherein a cell of the desired target cell type is a central nervous system cell.

24. The method of claim 23, wherein a cell of the desired target cell type is a microglial cell or an astrocyte.

25. A kit for identifying or generating engineered AAV capsid proteins exhibiting preferential tropism to a desired target cell type, the kit comprising a library of rAAVs of claim 15, a library of nucleic acid constructs of claim 20, or a plurality of cells of claim 21.
